(19) United States
(12) Patent Application Publication
(10) Pub. No.: US 2018/0223336 A1
(43) Pub. Date: Aug. 9, 2018

(54) GENETIC TESTING FOR PREDICTING RESISTANCE OF MORGANELLA SPECIES AGAINST ANTIMICROBIAL AGENTS

(71) Applicant: Ares Genetics GmbH, Vienna (AT)

(72) Inventors: Andreas Keller, Puttlingen (DE); Susanne Schmolke, Erlangen (DE); Cord Friedrich Stahler, Hirschberg an der Bergstrasse (DE); Christina Backes, Saarbrucken (DE); Valentina Galata, Saarbrucken (DE)

(21) Appl. No.: 15/745,935

(22) PCT Filed: Jul. 21, 2016
(86) PCT No.: PCT/EP2016/067446

§ 371 Date: Jan. 18, 2018

(30) Foreign Application Priority Data
Jul. 22, 2015 (EP) PCT/EP2015/066699

(51) Int. Cl. C12Q 1/689; G06F 19/18; G06F 19/22

(52) U.S. Cl. CPC C12Q 1/689; G06F 19/18; C12Q 2600/112; C12Q 2600/156; G06F 19/22

(57) ABSTRACT

The invention relates to a method of determining an infection of a patient with Morganella species potentially resistant to antimicrobial drug treatment, a method of selecting a treatment of a patient suffering from an antibiotic resistant Morganella infection, and a method of determining an antibiotic resistance profile for bacterial microorganisms of Morganella species, as well as computer program products used in these methods. In an exemplary method, a sample 1, is used for molecular testing 2, and then a molecular fingerprint 3 is taken. The result is then compared to a reference library 4, and the result 5 is reported.

[0001] The present invention relates to a method of determining an infection of a patient with Morganella species potentially resistant to antimicrobial drug treatment, a method of selecting a treatment of a patient suffering from an infection with a potentially resistant Morganella strain, and a method of determining an antimicrobial drug, e.g. antibiotic, resistance profile for bacterial microorganisms of Morganella species, as well as computer program products used in these methods.

[0002] Antibiotic resistance is a form of drug resistance whereby a sub-population of a microorganism, e.g. a strain of a bacterial species, can survive and multiply despite exposure to an antibiotic drug. It is a serious and health concern for the individual patient as well as a major public health issue. Timely treatment of a bacterial infection requires the analysis of clinical isolates obtained from patients with regard to antibiotic resistance, in order to select an efficacious therapy. Generally, for this purpose an association of the identified resistance with a certain microorganism (i.e. ID) is necessary.

[0003] Antibacterial drug resistance (ADR) represents a major health burden. According to the World Health Organization's antimicrobial resistance global report on surveillance, ADR leads to 25,000 deaths per year in Europe and 23,000 deaths per year in the US. In Europe, 2.5 million extra hospital days lead to societal cost of 1.5 billion euro. In the US, the direct cost of 2 million illnesses leads to 20 billion dollar direct cost. The overall cost is estimated to be substantially higher, reducing the gross domestic product (GDP) by up to 1.6%.

[0004] The genus Morganella belongs to the family Enterobacteriaceae. Morganella ssp. are gram-negative rod commonly found in the environment and in the intestinal tracts of humans, mammals, and reptiles as normal flora. Despite wide distribution, Morganella is an uncommon cause of community-acquired infection, the majority of infections caused by Morganella are in patients who have been hospitalized and may have urinary catheters or intravenous lines or wounds that can get infected.

[0005] Clinical infections due to Morganella morganii often involve the urinary tract, skin and soft tissue and hepatobiliary tract. Urinary tract infection is the most common clinical infection site. Most often these occur in elderly patients in nursing homes with long-term indwelling catheters.

[0006] Morganella may rarely cause bacteremia. In a multicenter study of 2084 cases of bacteremia in Britain, Morganella accounted for 1% of cases and 4 deaths. Morganella has been reported as the cause of up to 3% of bacteremias in a nursing home, arising primarily from either the urinary tract or soft tissue infections.

[0007] Morganella morganii infections respond well to appropriate antibiotic therapy; however, its natural resistance to many beta-lactam antibiotics may lead to delays in proper treatment. Most strains are naturally susceptible to piperacillin, ticarcillin, mezlocillin, third-generation and fourth-generation cephalosporins, carbapenems, aztreonam, fluoroquinolones, aminoglycosides, and chloramphenicol. The widespread use of third-generation cephalosporins has been associated with the emergence of highly resistant Morganella morganii.

[0008] In general the mechanisms for resistance of bacteria against antimicrobial treatments rely to a very substantial part on the organism's genetics. The respective genes or molecular mechanisms are either encoded in the genome of the bacteria or on plasmids that can be interchanged between different bacteria. The most common resistance mechanisms include:
[0009] 1) Efflux pumps are high-affinity reverse transport systems located in the membrane that transports the antibiotic out of the cell, e.g. resistance to tetracycline.
[0010] 2) Specific enzymes modify the antibiotic in a way that it loses its activity. In the case of streptomycin, the antibiotic is chemically modified so that it will no longer bind to the ribosome to block protein synthesis.
[0011] 3) An enzyme is produced that degrades the antibiotic, thereby inactivating it. For example, the penicillinases are a group of beta-lactamase enzymes that cleave the beta lactam ring of the penicillin molecule.

[0012] In addition, some pathogens show natural resistance against drugs. For example, an organism can lack a transport system for an antibiotic or the target of the antibiotic molecule is not present in the organism.

[0013] Pathogens that are in principle susceptible to drugs can become resistant by modification of existing genetic material (e.g. spontaneous mutations for antibiotic resistance, happening in a frequency of one in about 100 mio bacteria in an infection) or the acquisition of new genetic material from another source. One example is horizontal gene transfer, a process where genetic material contained in small packets of DNA can be transferred between individual bacteria of the same species or even between different species. Horizontal gene transfer may happen by transduction, transformation or conjugation.

[0014] Generally, testing for susceptibility/resistance to antimicrobial agents is performed by culturing organisms in different concentration of these agents.

[0015] In brief, agar plates are inoculated with patient sample (e.g. urine, sputum, blood, stool) overnight. On the next day individual colonies are used for identification of organisms, either by culturing or using mass spectroscopy. Based on the identity of organisms new plates containing increasing concentration of drugs used for the treatment of these organisms are inoculated and grown for additional 12-24 hours. The lowest drug concentration which inhibits growth (minimal inhibitory concentration—MIC) is used to determine susceptibility/resistance for tested drugs. The process takes at least 2 to 3 working days during which the patient is treated empirically. A significant reduction of time-to-result is needed especially in patients with life-threatening disease and to overcome the widespread misuse of antibiotics.

[0016] Recent developments include PCR based test kits for fast bacterial identification (e.g. Biomerieux Biofire Tests, Curetis Unyvero Tests). With these test the detection of selected resistance loci is possible for a very limited number of drugs, but no correlation to culture based AST is given. Mass spectroscopy is increasingly used for identification of pathogens in clinical samples (e.g. Bruker Biotyper), and research is ongoing to establish methods for the detection of susceptibility/resistance against antibiotics.

[0017] For some drugs such it is known that at least two targets are addressed, e.g. in case of Ciprofloxacin (drug bank ID 00537; http://www.drugbank.ca/drugs/DB00537) targets include DNA Topoisomerase IV, DNA Topoisomerase II and DNA Gyrase. It can be expected that this is also the case for other drugs although the respective secondary targets have not been identified yet. In case of a common regulation, both relevant genetic sites would naturally show a co-correlation or redundancy.

[0018] It is known that drug resistance can be associated with genetic polymorphisms. This holds for viruses, where resistance testing is established clinical practice (e.g. HIV genotyping). More recently, it has been shown that resistance has also genetic causes in bacteria and even higher organisms, such as humans where tumors resistance against certain cytostatic agents can be linked to genomic mutations.

[0019] Wozniak et al. (BMC Genomics 2012, 13(Suppl 7):S23) disclose genetic determinants of drug resistance in Staphylococcus aureus based on genotype and phenotype data. Stoesser et al. disclose prediction of antimicrobial susceptibilities for Escherichia coli and Klebsiella pneumoniae isolates using whole genomic sequence data (J Antimicrob Chemother 2013; 68: 2234-2244).

[0020] Chewapreecha et al (Chewapreecha et al (2014) Comprehensive Identification of single nucleotid polymorphisms associated with beta-lactam resistance within pneumococcal mosaic genes. PLoS Genet 10(8): e1004547) used a comparable approach to identify mutations in gram-positive Streptococcus Pneumonia.

[0021] The fast and accurate detection of infections with Morganella species and the prediction of response to anti-microbial therapy represent a high unmet clinical need.

[0022] This need is addressed by the present invention.

### SUMMARY OF THE INVENTION

[0023] The present inventors addressed this need by carrying out whole genome sequencing of a large cohort of Morganella clinical isolates and comparing the genetic mutation profile to classical culture based antimicrobial susceptibility testing with the goal to develop a test which can be used to detect bacterial susceptibility/resistance against antimicrobial drugs using molecular testing.

[0024] The inventors performed extensive studies on the genome of bacteria of Morganella species either susceptible or resistant to antimicrobial, e.g. antibiotic, drugs. Based on this information, it is now possible to provide a detailed analysis on the resistance pattern of Morganella strains based on individual genes or mutations on a nucleotide level. This analysis involves the identification of a resistance against individual antimicrobial, e.g. antibiotic, drugs as well as clusters of them. This allows not only for the determination of a resistance to a single antimicrobial, e.g. antibiotic, drug, but also to groups of antimicrobial drugs, e.g. antibiotics such as lactam or quinolone antibiotics, or even to all relevant antibiotic drugs.

[0025] Therefore, the present invention will considerably facilitate the selection of an appropriate antimicrobial, e.g. antibiotic, drug for the treatment of a Morganella infection in a patient and thus will largely improve the quality of diagnosis and treatment.

[0026] According to a first aspect, the present invention discloses a diagnostic method of determining an infection of a patient with Morganella species potentially resistant to antimicrobial drug treatment, which can be also described as a method of determining an antimicrobial drug, e.g. antibiotic, resistant Morganella infection of a patient, comprising the steps of:

[0027] a) obtaining or providing a sample containing or suspected of containing at least one Morganella species from the patient;

[0028] b) determining the presence of at least one mutation in at least two genes from the group of genes listed in Table 1 or Table 2 below, wherein the presence of said at least two mutations is indicative of an infection with an antimicrobial drug resistant, e.g. antibiotic resistant, Morganella strain in said patient.

[0029] An infection of a patient with Morganella species potentially resistant to antimicrobial drug treatment herein means an infection of a patient with Morganella species wherein it is unclear if the Morganella species is susceptible to treatment with a specific antimicrobial drug or if it is resistant to the antimicrobial drug.

[0030] In step b) above, as well as corresponding steps, at least one mutation in at least two genes is determined, so that in total at least two mutations are determined, wherein the two mutations are in different genes.

TABLE 1
List of genes

| | | | | | |
|---|---|---|---|---|---|
| MU9_880 | MU9_413 | MU9_1843 | MU9_425 | MU9_14 | MU9_3039 |
| MU9_3029 | MU9_626 | MU9_3041 | MU9_489 | MU9_2759 | MU9_2077 |
| MU9_502 | MU9_2754 | MU9_2763 | MU9_2127 | MU9_1555 | MU9_2124 |
| MU9_3032 | MU9_3373 | MU9_1716 | MU9_910 | MU9_1547 | MU9_3338 |
| MU9_1556 | MU9_2545 | MU9_2764 | MU9_146 | MU9_2018 | MU9_3034 |
| MU9_1112 | MU9_875 | MU9_2404 | MU9_718 | MU9_2587 | MU9_1311 |
| MU9_1153 | MU9_3478 | MU9_346 | MU9_3401 | MU9_2177 | MU9_1142 |
| MU9_1507 | MU9_2791 | MU9_1456 | MU9_720 | MU9_63 | MU9_3309 |
| MU9_3395 | MU9_911 | MU9_2615 | | | |

TABLE 2
List of genes

| | | | | | |
|---|---|---|---|---|---|
| MU9_880 | MU9_413 | MU9_1843 | MU9_425 | MU9_14 | MU9_3039 |
| MU9_3029 | MU9_626 | MU9_3041 | MU9_489 | MU9_2759 | MU9_2077 |
| MU9_502 | MU9_2754 | MU9_2763 | MU9_2127 | MU9_1555 | MU9_2124 |
| MU9_3032 | MU9_3373 | MU9_1716 | MU9_910 | MU9_1547 | MU9_3338 |
| MU9_1556 | MU9_2545 | MU9_2764 | MU9_146 | MU9_2018 | MU9_3034 |
| MU9_1112 | MU9_875 | MU9_2404 | MU9_718 | MU9_2587 | MU9_1311 |
| MU9_1153 | MU9_3478 | MU9_346 | MU9_3401 | MU9_2177 | MU9_1142 |
| MU9_1507 | MU9_2791 | MU9_1456 | MU9_720 | MU9_63 | MU9_3309 |
| MU9_3395 | MU9_911 | MU9_2615 | | | |

[0031] According to a second aspect, the present invention relates to a method of selecting a treatment of a patient suffering from an infection with a potentially resistant Morganella stain, e.g. from an antimicrobial drug, e.g. antibiotic, resistant Morganella infection, comprising the steps of:

[0032] a) obtaining or providing a sample containing or suspected of containing at least one Morganella species from the patient;

[0033] b) determining the presence of at least one mutation in at least two genes from the group of genes listed in Table 1 or Table 2 above, wherein the presence of said at least two mutations is indicative of a resistance to one or more antimicrobial, e.g. antibiotic, drugs;

[0034] c) identifying said at least one or more antimicrobial, e.g. antibiotic, drugs; and

[0035] d) selecting one or more antimicrobial, e.g. antibiotic, drugs different from the ones identified in step c) and being suitable for the treatment of a Morganella infection.

[0036] A third aspect of the present invention relates to a method of determining an antimicrobial drug, e.g. antibiotic, resistance profile for bacterial microorganisms of Morganella species, comprising:

[0037] obtaining or providing a first data set of gene sequences of a plurality of clinical isolates of Morganella species;

[0038] providing a second data set of antimicrobial drug, e.g. antibiotic, resistance of the plurality of clinical isolates of Morganella species;

[0039] aligning the gene sequences of the first data set to at least one, preferably one, reference genome of Morganella, and/or assembling the gene sequence of the first data set, at least in part;

[0040] analyzing the gene sequences of the first data set for genetic variants to obtain a third data set of genetic variants;

[0041] correlating the third data set with the second data set and statistically analyzing the correlation; and

[0042] determining the genetic sites in the genome of Morganella associated with antimicrobial drug, e.g. antibiotic, resistance.

[0043] In addition, the present invention relates in a fourth aspect to a method of determining an antimicrobial drug, e.g. antibiotic, resistance profile for a bacterial microorganism belonging to the species Morganella comprising the steps of

[0044] a) obtaining or providing a sample containing or suspected of containing the bacterial microorganism;

[0045] b) determining the presence of a mutation in at least one gene of the bacterial microorganism as determined by the method according to the third aspect of the present invention;

[0046] wherein the presence of a mutation is indicative of a resistance to an antimicrobial, e.g. antibiotic, drug.

[0047] Furthermore, the present invention discloses in a fifth aspect a diagnostic method of determining an infection of a patient with Morganella species potentially resistant to anti-microbial drug treatment, which can, like in the first aspect, also be described as method of determining an antimicrobial drug, e.g. antibiotic, resistant Morganella infection of a patient, comprising the steps of:

[0048] a) obtaining or providing a sample containing or suspected of containing a bacterial microorganism belonging to the species Morganella from the patient;

[0049] b) determining the presence of at least one mutation in at least one gene of the bacterial microorganism belonging to the species Morganella as determined by the method according to the third aspect of the present invention, wherein the presence of said at least one mutation is indicative of an antimicrobial drug, e.g. antibiotic, resistant Morganella infection in said patient.

[0050] Also disclosed is in a sixth aspect a method of selecting a treatment of a patient suffering from an infection with a potentially resistant Morganella strain, e.g. from an antimicrobial drug, e.g. antibiotic, resistant Morganella infection, comprising the steps of:

[0051] a) obtaining or providing a sample containing or suspected of containing a bacterial microorganism belonging to the species Morganella from the patient;

[0052] b) determining the presence of at least one mutation in at least one gene of the bacterial microorganism belonging to the species Morganella as determined by the method according to the third aspect of the present invention, wherein the presence of said at least one mutation is indicative of a resistance to one or more antimicrobial, e.g. antibiotic, drugs;

[0053] c) identifying said at least one or more antimicrobial, e.g. antibiotic, drugs; and

[0054] d) selecting one or more antimicrobial, e.g. antibiotic, drugs different from the ones identified in step c) and being suitable for the treatment of a Morganella infection.

[0055] A seventh aspect of the present invention relates to a method of acquiring, respectively determining, an antimicrobial drug, e.g. antibiotic, resistance profile for a bacterial microorganism of Morganella species, comprising:

[0056] obtaining or providing a first data set of gene sequences of a clinical isolate of Morganella species;

[0057] providing a second data set of antimicrobial drug, e.g. antibiotic, resistance of a plurality of clinical isolates of Morganella species;

[0058] aligning the gene sequences of the first data set to at least one, preferably one, reference genome of Morganella, and/or assembling the gene sequence of the first data set, at least in part;

[0059] analyzing the gene sequences of the first data set for genetic variants to obtain a third data set of genetic variants of the first data set;

[0060] correlating the third data set with the second data set and statistically analyzing the correlation; and

[0061] determining the genetic sites in the genome of Morganella of the first data set associated with antimicrobial drug, e.g. antibiotic, resistance.

[0062] According to an eighth aspect, the present invention discloses a computer program product comprising executable instructions which, when executed, perform a method according to the third, fourth, fifth, sixth or seventh aspect of the present invention.

[0063] Further aspects and embodiments of the invention are disclosed in the dependent claims and can be taken from the following description, figures and examples, without being limited thereto.

### FIGURES

[0064] The enclosed drawings should illustrate embodiments of the present invention and convey a further understanding thereof.

[0065] In connection with the description they serve as explanation of concepts and principles of the invention. Other embodiments and many of the stated advantages can be derived in relation to the drawings. The elements of the drawings are not necessarily to scale towards each other. Identical, functionally equivalent and acting equal features and components are denoted in the figures of the drawings with the same reference numbers, unless noted otherwise.

[0066] FIG. 1 shows schematically a read-out concept for a diagnostic test according to a method of the present invention.

### DETAILED DESCRIPTION OF THE PRESENT INVENTION

[0067] Definitions

[0068] Unless defined otherwise, technical and scientific terms used herein have the same meaning as commonly understood by one of ordinary skill in the art to which this invention belongs.

[0069] An “antimicrobial drug” in the present invention refers to a group of drugs that includes antibiotics, antifungals, antiprotozoals, and antivirals. According to certain embodiments, the antimicrobial drug is an antibiotic.

[0070] The term “nucleic acid molecule” refers to a polynucleotide molecule having a defined sequence. It comprises DNA molecules, RNA molecules, nucleotide analog molecules and combinations and derivatives thereof, such as DNA molecules or RNA molecules with incorporated nucleotide analogs or cDNA.

[0071] The term “nucleic acid sequence information” relates to information which can be derived from the sequence of a nucleic acid molecule, such as the sequence itself or a variation in the sequence as compared to a reference sequence.

[0072] The term “mutation” relates to a variation in the sequence as compared to a reference sequence. Such a reference sequence can be a sequence determined in a predominant wild type organism or a reference organism, e.g. a defined and known bacterial strain or substrain. A mutation is for example a deletion of one or multiple nucleotides, an insertion of one or multiple nucleotides, or substitution of one or multiple nucleotides, duplication of one or a sequence of multiple nucleotides, translocation of one or a sequence of multiple nucleotides, and, in particular, a single nucleotide polymorphism (SNP).

[0073] In the context of the present invention a “sample” is a sample which comprises at least one nucleic acid molecule from a bacterial microorganism. Examples for samples are: cells, tissue, body fluids, biopsy specimens, blood, urine, saliva, sputum, plasma, serum, cell culture supernatant, swab sample and others. According to certain embodiments, the sample is a patient sample (clinical isolate).

[0074] New and highly efficient methods of sequencing nucleic acids referred to as next generation sequencing have opened the possibility of large scale genomic analysis. The term “next generation sequencing” or “high throughput sequencing” refers to high-throughput sequencing technologies that parallelize the sequencing process, producing thousands or millions of sequences at once. Examples include Massively Parallel Signature Sequencing (MPSS), Polony sequencing, 454 pyrosequencing, Illumina (Solexa) sequencing, SOLiD sequencing, Ion semiconductor sequencing, DNA nanoball sequencing, Helioscope(TM) single molecule sequencing, Single Molecule SMRT(TM) sequencing, Single Molecule real time (RNAP) sequencing, Nanopore DNA sequencing, Sequencing By Hybridization, Amplicon Sequencing, GnuBio.

[0075] Within the present description the term “microorganism” comprises the term microbe. The type of microorganism is not particularly restricted, unless noted otherwise or obvious, and, for example, comprises bacteria, viruses, fungi, microscopic algae and protozoa, as well as combinations thereof. According to certain aspects, it refers to one or more Morganella species, particularly Morganella morganii.

[0076] A reference to a microorganism or microorganisms in the present description comprises a reference to one microorganism as well a plurality of microorganisms, e.g. two, three, four, five, six or more microorganisms.

[0077] A vertebrate within the present invention refers to animals having a vertebrae, which includes mammals—including humans, birds, reptiles, amphibians and fishes. The present invention thus is not only suitable for human medicine, but also for veterinary medicine.

[0078] According to certain embodiments, the patient in the present methods is a vertebrate, more preferably a mammal and most preferred a human patient.

[0079] Before the invention is described in exemplary detail, it is to be understood that this invention is not limited to the particular component parts of the process steps of the methods described herein as such methods may vary. It is also to be understood that the terminology used herein is for purposes of describing particular embodiments only, and is not intended to be limiting. It must be noted that, as used in the specification and the appended claims, the singular forms “a,” “an” and “the” include singular and/or plural referents unless the context clearly dictates otherwise. For example, the term “a” as used herein can be understood as one single entity or in the meaning of “one or more” entities. It is also to be understood that plural forms include singular and/or plural referents unless the context clearly dictates otherwise. It is moreover to be understood that, in case parameter ranges are given which are delimited by numeric values, the ranges are deemed to include these limitation values.

[0080] Regarding the dosage of the antimicrobial, e.g. antibiotic, drugs, it is referred to the established principles of pharmacology in human and veterinary medicine. For example, Forth, Henschler, Rummel “Allgemeine und spezielle Pharmakologie und Toxikologie”, 9th edition, 2005, pp. 781-919, might be used as a guideline. Regarding the formulation of a ready-to-use medicament, reference is made to “Remington, The Science and Practice of Pharmacy”, 22^{nd} edition, 2013, pp. 777-1070.

[0081] Assembling of a gene sequence can be carried out by any known method and is not particularly limited.

[0082] According to certain embodiments, mutations that were found using alignments can also be compared or matched with alignment-free methods, e.g. for detecting single base exchanges, for example based on contigs that were found by assemblies. For example, reads obtained from sequencing can be assembled to contigs and the contigs can be compared to each other.

[0083] According to a first aspect, the present invention relates to a diagnostic method of determining an infection of a patient with Morganella species potentially resistant to antimicrobial drug treatment, which can also be described as method of determining an antimicrobial drug, e.g. antibiotic, resistant Morganella infection of a patient, comprising the steps of:

[0084] a) obtaining or providing a sample containing or suspected of containing at least one Morganella species from the patient;

[0085] b) determining the presence of at least one mutation in at least two genes from the group of genes consisting of MU9_880, MU9_413, MU9_1843, MU9_425, MU9_14, MU9_3039, MU9_3029, MU9_626, MU9_3041, MU9_489, MU9_2759, MU9_2077, MU9_502, MU9_2754, MU9_2763, MU9_2127, MU9_1555, MU9_2124, MU9_3032, MU9_3373, MU9_1716, MU9_910, MU9_1547, MU9_3338, MU9_1556, MU9_2545, MU9_2764, MU9_146, MU9_2018, MU9_3034, MU9_1112, MU9_875, MU9_2404, MU9_718, MU9_2587, MU9_1311, MU9_1153, MU9_3478, MU9_346, MU9_3401, MU9_2177, MU9_1142, MU9_1507, MU9_2791, MU9_1456, MU9_720, MU9_63, MU9_3309, MU9_3395, MU9_911, and MU9_2615, preferably MU9_413, MU9_425, MU9_14, MU9_3029, MU9_626, MU9_2759, MU9_2077, MU9_502, MU9_2754, MU9_2763, MU9_2127, MU9_1555, MU9_2124, MU9_3032, MU9_3373, MU9_1716, MU9_910, MU9_1547, MU9_3338, MU9_1556, MU9_2545, MU9_2764, MU9_146, MU9_2018, MU9_3034, MU9_1112, MU9_875, MU9_2404, MU9_718, MU9_2587, MU9_1311, MU9_1153, MU9_3478, MU9_346, MU9_3401, MU9_2177, MU9_1142, MU9_1507, MU9_2791, MU9_1456, MU9_720, MU9_63, MU9_3309, MU9_3395, MU9_911, and MU9_2615, wherein the presence of said at least two mutations is indicative of an infection with an antimicrobial, e.g. antibiotic, resistant Morganella strain in said patient.

[0086] In this method, as well as the other methods of the invention, the sample can be provided or obtained in any way, preferably non-invasive, and can be e.g. provided as an in vitro sample or prepared as in vitro sample.

[0087] According to certain aspects, mutations in at least two, three, four, five, six, seven, eight, nine or ten genes are determined in any of the methods of the present invention, e.g. in at least two genes or in at least three genes. Instead of testing only single genes or mutants, a combination of several variant positions can improve the prediction accuracy and further reduce false positive findings that are influenced by other factors. Therefore, it is in particular preferred to determine the presence of a mutation in 2, 3, 4, 5, 6, 7, 8 or 9 (or more) genes selected from Table 1 or 2.

[0088] For the above genes, i.e. the genes also denoted in Tables 1 and 2, the highest probability of a resistance to at least one antimicrobial drug, e.g. antibiotic, could be observed, with p-values smaller than 10^{-1s}, particularly smaller than 10⁻²⁰, indicating the high significance of the values (n=300; α=0.05). Details regarding Tables 1 and 2 can be taken from Tables 3 and 4 (4a, 4b, 4c) disclosed in the Examples. Having at least two genes with mutations determined, a high probability of an antimicrobial drug, e.g. antibiotic, resistance could be determined. The genes in Table 1 thereby represent the 51 best genes for which a mutation was observed in the genomes of Morganella species, whereas the genes in Table 2 represent the 51 best genes for which a cross-correlation could be observed for the antimicrobial drug, e.g. antibiotic, susceptibility testing for Morganella species as described below.

[0089] According to certain embodiments, the obtaining or providing a sample containing or suspected of containing at least one Morganella species from the patient in this method—as well as the other methods of the invention—can comprise the following:

[0090] A sample of a vertebrate, e.g. a human, e.g. is provided or obtained and nucleic acid sequences, e.g. DNA or RNA sequences, are recorded by a known method for recording nucleic acid, which is not particularly limited. For example, nucleic acid can be recorded by a sequencing method, wherein any sequencing method is appropriate, particularly sequencing methods wherein a multitude of sample components, as e.g. in a blood sample, can be analyzed for nucleic acids and/or nucleic acid fragments and/or parts thereof contained therein in a short period of time, including the nucleic acids and/or nucleic acid fragments and/or parts thereof of at least one microorganism of interest, particularly of at least one Morganella species. For example, sequencing can be carried out using polymerase chain reaction (PCR), particularly multiplex PCR, or high throughput sequencing or next generation sequencing, preferably using high-throughput sequencing. For sequencing, preferably an in vitro sample is used.

[0091] The data obtained by the sequencing can be in any format, and can then be used to identify the nucleic acids, and thus genes, of the microorganism, e.g. of Morganella species, to be identified, by known methods, e.g. fingerprinting methods, comparing genomes and/or aligning to at least one, or more, genomes of one or more species of the microorganism of interest, i.e. a reference genome, etc., forming a third data set of aligned genes for a Morganella species—discarding additional data from other sources, e.g. the vertebrate. Reference genomes are not particularly limited and can be taken from several databases. Depending on the microorganism, different reference genomes or more than one reference genomes can be used for aligning. Using the reference genome—as well as also the data from the genomes of the other species, e.g. Morganella species—mutations in the genes for each species and for the whole multitude of samples of different species, e.g. Morganella species, can be obtained.

[0092] For example, it is useful in genome-wide association studies to reference the points of interest, e.g. mutations, to one constant reference for enhanced standardization. In case of the human with a high consistency of the genome and 99% identical sequences among individuals this is easy and represents the standard, as corresponding reference genomes are available in databases. In case of organisms that trigger infectious diseases (e.g. bacteria and viruses) this is much more difficult, though. One possibility is to fall back on a virtual pan genome which contains all sequences of a certain genus. A further possibility is the analysis of all available references, which is much more complex. Therein all n references from a database (e.g. RefSeq) are extracted and compared with the newly sequenced bacterial genomes k. After this, matrices (% of mapped reads, % of covered genome) are applied to estimate which reference is best suited to all new bacteria. However, n x k complete alignments are carried out. Having a big number of references, though, stable results can be obtained, as is the case for Morganella.

[0093] According to certain embodiments, the genomes of Morganella species are referenced to one reference genome. However, it is not excluded that for other microorganisms more than one reference genome is used. In the present methods, the reference genome of Morganella is NC_020418 as annotated at the NCBI according to certain embodiments. The reference genome is attached to this application as sequence listing with SEQ ID NO 1.

[0094] The reference sequence was obtained from Morganella strain NC_020418 (http://www.genome.jp/dbget-_bin/wwwbget?refseq+NC_020418) LOCUS NC_020418 3799539 bp DNA circular CON 18-Dec.-2014 DEFINITION Morganella morganii subsp. morganii KT, complete genome.

| | |
|---|---|
| ACCESSION | NC_020418 |
| VERSION | NC_020418.1 GI: 455737153 |
| DBLINK | BioProject: PRJNA180867 |
| KEYWORDS | RefSeq. |
| SOURCE | Morganella morganii subsp. morganii KT |
| ORGANISM | Morganella morganii subsp. morganii KT |
| | Bacteria; Proteobacteria; Gammaproteobacteria; |
| | Enterobacteriales; Enterobacteriaceae; Morganella. |
| | REFERENCE 1 (bases 1 to 3799539) |
| AUTHORS | Chen, Y. T., Peng, H. L., Shia, W. C., Hsu, F. R., |
| | Ken, C. F., Tsao, Y. M., Chen, C. H., Liu, C. E., Hsieh, M. F., |
| | Chen, H. C., Tang, C. Y. and Ku, T. H. |
| TITLE | Whole-genome sequencing and identification of |
| | Morganella morganii KT pathogenicity-related genes |
| JOURNAL | BMC Genomics 13 (SUPPL 7), S4 (2012) |
| PUBMED | 23282187 |
| REFERENCE | 2 (bases 1 to 3799539) |
| CONSRTM | NCBI Genome Project |
| TITLE | Direct Submission |
| JOURNAL | Submitted (28 Feb. 2013) National Center for Bio- |
| | technology Information, NIH, Bethesda, MD 20894, USA |
| REFERENCE | 3 (bases 1 to 3799539) |
| AUTHORS | Ku, T. -H., Chen, Y. -T., Liou, M. -L., Liu, C. -C., |
| | Peng, H. -L., Liu, C. -E., Ken, C. -F., Lu, C. -W., Chen, G. S., |
| | Tsao, Y. -M. , Ku, T. -C. and Tang, C. Y. |
| TITLE | Direct Submission |
| JOURNAL | Submitted (26 Feb. 2013) Department of Anesthesia; |
| | Department of Computer Science and Information Engineering, |
| | Changhua Christian Hospital; Providence University, 200 |
| | Chung-Chi Rd., Taichung City, Taiwan 43301, Taiwan |

[0095] Alternatively or in addition, the gene sequence of the first data set can be assembled, at least in part, with known methods, e.g. by de-novo assembly or mapping assembly. The sequence assembly is not particularly limited, and any known genome assembler can be used, e.g. based on Sanger, 454, Solexa, Illumina, SOLid technologies, etc., as well as hybrids/mixtures thereof.

[0096] According to certain embodiments, the data of nucleic acids of different origin than the microorganism of interest, e.g. Morganella species, can be removed after the nucleic acids of interest are identified, e.g. by filtering the data out. Such data can e.g. include nucleic acids of the patient, e.g. the vertebrate, e.g. human, and/or other microorganisms, etc. This can be done by e.g. computational subtraction, as developed by Meyerson et al. 2002. For this, also aligning to the genome of the vertebrate, etc., is possible. For aligning, several alignment-tools are available. This way the original data amount from the sample can be drastically reduced.

[0097] Also after such removal of “excess” data, fingerprinting and/or aligning, and/or assembly, etc. can be carried out, as described above, forming a third data set of aligned and/or assembled genes for a Morganella species.

[0098] Using these techniques, genes with mutations of the microorganism of interest, e.g. Morganella species, can be obtained for various species.

[0099] When testing these same species for antimicrobial drug, e.g. antibiotic, susceptibility of a number of antimicrobial drugs, e.g. antibiotics, e.g. using standard culturing methods on dishes with antimicrobial drug, e.g. antibiotic, intake, as e.g. described below, the results of these antimicrobial drug, e.g. antibiotic, susceptibility tests can then be cross-referenced/correlated with the mutations in the genome of the respective microorganism, e.g. Morganella. Using several, e.g. 50 or more than 50, 100 or more than 100, 150 or more than 150, 200 or more than 200, 250 or more than 250, or 300 or more than 300 different species of a microorganism, e.g. different Morganella species, statistical analysis can be carried out on the obtained cross-referenced data between mutations and antimicrobial drug, e.g. antibiotic, susceptibility for these number of species, using known methods.

[0100] Regarding culturing methods, samples can be e.g. cultured overnight. On the next day individual colonies can be used for identification of organisms, either by culturing or using mass spectroscopy. Based on the identity of organisms new plates containing increasing concentration of antibiotics used for the treatment of these organisms are inoculated and grown for additional 12-24 hours. The lowest drug concentration which inhibits growth (minimal inhibitory concentration—MIC) can be used to determine susceptibility/resistance for tested antibiotics.

[0101] Correlation of the nucleic acid/gene mutations with antimicrobial drug, e.g. antibiotic, resistance can be carried out in a usual way and is not particularly limited. For example, resistances can be correlated to certain genes or certain mutations, e.g. SNPs, in genes. After correlation, statistical analysis can be carried out.

[0102] In addition, statistical analysis of the correlation of the gene mutations with antimicrobial drug, e.g. antibiotic, resistance is not particularly limited and can be carried out, depending on e.g. the amount of data, in different ways, for example using analysis of variance (ANOVA) or Student's t-test, for example with a sample size n of 50 or more, 100 or more, 150 or more, 200 or more, 250 or 300 or more, and a level of significance (a-error-level) of e.g. 0.05 or smaller, e.g. 0.05, preferably 0.01 or smaller. A statistical value can be obtained for each gene and/or each position in the genome as well as for all antibiotics tested, a group of antibiotics or a single antibiotic. The obtained p-values can also be adapted for statistical errors, if needed.

[0103] For statistically sound results a multitude of individuals should be sampled, with n =50, 100, 150, 200, 250 or 300, and a level of significance (a-error-level) of e.g. 0.05 or smaller, e.g. 0.05, preferably 0.01 or smaller. According to certain embodiments, particularly significant results can be obtained for n=150, 200, 250 or 300.

[0104] For statistically sound results a multitude of individuals should be sampled, with n =50 or more, 100 or more, 150 or more, 200 or more, 250 or more or 300 or more, and a level of significance (a-error-level) of e.g. 0.05 or smaller, e.g. 0.05, preferably 0.01 or smaller. According to certain embodiments, particularly significant results can be obtained for n =150 or more, 200 or more, 250 or more or 300 or more.

[0105] After the above procedure has been carried out for more than 250, e.g. 300, individual species of Morganella, the data disclosed in Tables 1 and 2 were obtained for the statistically best correlations between gene mutations and antimicrobial drug, e.g. antibiotic, resistances. Thus, mutations in these genes were proven as valid markers for antimicrobial drug, e.g. antibiotic, resistance.

[0106] According to a further aspect, the present invention relates in a second aspect to a method of selecting a treatment of a patient suffering from an infection with a potentially resistant Morganella stain, e.g. from an antimicrobial drug, e.g. antibiotic, resistant Morganella infection, comprising the steps of:

[0107] a) obtaining or providing a sample containing or suspected of containing at least one Morganella species from the patient;

[0108] b) determining the presence of at least one mutation in at least two genes from the group of genes consisting of MU9_880, MU9_413, MU9_1843, MU9_425, MU9_14, MU9_3039, MU9_3029, MU9_626, MU9_3041, MU9_489, MU9_2759, MU9_2077, MU9_502, MU9_2754, MU9_2763, MU9_2127, MU9_1555, MU9_2124, MU9_3032, MU9_3373, MU9_1716, MU9_910, MU9_1547, MU9_3338, MU9_1556, MU9_2545, MU9_2764, MU9_146, MU9_2018, MU9_3034, MU9_1112, MU9_875, MU9_2404, MU9_718, MU9_2587, MU9_1311, MU9_1153, MU9_3478, MU9_346, MU9_3401, MU9_2177, MU9_1142, MU9_1507, MU9_2791, MU9_1456, MU9_720, MU9_63, MU9_3309, MU9_3395, MU9_911, and MU9_2615, preferably MU9_413, MU9_425, MU9_14, MU9_3029, MU9_626, MU9_2759, MU9_2077, MU9_502, MU9_2754, MU9_2763, MU9_2127, MU9_1555, MU9_2124, MU9_3032, MU9_3373, MU9_1716, MU9_910, MU9_1547, MU9_3338, MU9_1556, MU9_2545, MU9_2764, MU9_146, MU9_2018, MU9_3034, MU9_1112, MU9_875, MU9_2404, MU9_718, MU9_2587, MU9_1311, MU9_1153, MU9_3478, MU9_346, MU9_3401, MU9_2177, MU9_1142, MU9_1507, MU9_2791, MU9_1456, MU9_720, MU9_63, MU9_3309, MU9_3395, MU9_911, and MU9_2615, wherein the presence of said at least two mutations is indicative of a resistance to one or more antimicrobial, e.g. antibiotic, drugs;

[0109] c) identifying said at least one or more antimicrobial, e.g. antibiotic, drugs; and

[0110] d) selecting one or more antimicrobial, e.g. antibiotic, drugs different from the ones identified in step c) and being suitable for the treatment of a Morganella infection.

[0111] In this method, the steps a) of obtaining or providing a sample and b) of determining the presence of at least one mutation are as in the method of the first aspect.

[0112] The identification of the at least one or more antimicrobial, e.g. antibiotic, drug in step c) is then based on the results obtained in step b) and corresponds to the antimicrobial, e.g. antibiotic, drug(s) that correlate(s) with the mutations. Once these antimicrobial drugs, e.g. antibiotics, are ruled out, the remaining antimicrobial drugs, e.g. antibiotic drugs/antibiotics, can be selected in step d) as being suitable for treatment.

[0113] In the description, references to the first and second aspect also apply to the 14^{th}, 15^{th}, 16^{th} and 17^{th} aspect, referring to the same genes, unless clear from the context that they don't apply.

[0114] According to certain embodiments in the method of the first or second aspect, at least a mutation in MU9_880 and/or MU9_413, preferably MU9_413, particularly in position 987896 and/or 453465, preferably 453465, respectively, with regard to reference genome NC_020418 as annotated at the NCBI, is determined. For such mutation, a particularly relevant correlation with antimicrobial drug, e.g. antibiotic, resistance could be determined. In particular, the mutation in position 987896 and/or 453465, respectively, with regard to reference genome NC 020418 as annotated at the NCBI is a non-synonymous coding, particularly a codon change aGc/aTc and/or ttC/ttG, respectively.

[0115] According to certain embodiments, the antimicrobial drug, e.g. antibiotic, in the method of the first or second aspect, as well as in the other methods of the invention, is at least one selected from the group of β-lactams, β-lactam inhibitors, quinolines and derivatives thereof, aminoglycosides, polyketides, respectively tetracyclines, and folate synthesis inhibitors.

[0116] In the methods of the invention the resistance of Morganella to one or more antimicrobial, e.g. antibiotic, drugs can be determined according to certain embodiments.

[0117] According to certain embodiments of the first and/or second aspect of the invention the antimicrobial, e.g. antibiotic, drug is selected from quinolone antibiotics, preferably fluoroquinolone antibiotics, and the presence of a mutation in the following genes is determined: MU9_880, MU9_1843, and/or MU9_489.

[0118] According to certain embodiments of the first and/or second aspect of the invention the antimicrobial, e.g. antibiotic, drug is selected from aminoglycoside antibiotics and the presence of a mutation in the following genes is determined: MU9_880, and/or MU9_1843.

[0119] According to certain embodiments of the first and/or second aspect of the invention the antimicrobial, e.g. antibiotic, drug is selected from polyketide antibiotics, preferably tetracycline antibiotics, and the presence of a mutation in the following genes is determined: MU9_413, MU9_425, MU9_14, MU9_3039, MU9_3029, MU9_626, MU9_3041, MU9_2759, MU9_2077, MU9_502, MU9_2754, MU9_2763, MU9_2127, MU9_1555, MU9_2124, MU9_3032, MU9_3373, MU9_1716, MU9_910, MU9_1547, MU9_3338, MU9_1556, MU9_2545, MU9_2764, MU9_146, MU9_2018, MU9_3034, MU9_1112, MU9_875, MU9_2404, MU9_718, MU9_2587, MU9_1311, MU9_1153, MU9_3478, MU9_346, MU9_3401, MU9_2177, MU9_1142, MU9_1507, MU9_2791, MU9_1456, MU9_720, MU9_63, MU9_3309, MU9_3395, MU9_911, and/or MU9_2615, preferably MU9_413, MU9_425, MU9_14, MU9_3029, MU9_626, MU9_2759, MU9_2077, MU9_502, MU9_2754, MU9_2763, MU9_2127, MU9_1555, MU9_2124, MU9_3032, MU9_3373, MU9_1716, MU9_910, MU9_1547, MU9_3338, MU9_1556, MU9_2545, MU9_2764, MU9_146, MU9_2018, MU9_3034, MU9_1112, MU9_875, MU9_2404, MU9_718, MU9_2587, MU9_1311, MU9_1153, MU9_3478, MU9_346, MU9_3401, MU9_2177, MU9_1142, MU9_1507, MU9_2791, MU9_1456, MU9_720, MU9_63, MU9_3309, MU9_3395, MU9_911, and/or MU9_2615.

[0120] According to certain embodiments of the first and/or second aspect of the invention the antimicrobial, e.g. antibiotic, drug is selected from benzene derived/sulfonamide antibiotics and the presence of a mutation in the following genes is determined: MU9_880, MU9_413, MU9_1843, MU9_425, and/or MU9_3041, preferably MU9_413 and/or MU9_425.

[0121] According to certain embodiments, the antimicrobial drug is an antibiotic/antibiotic drug.

[0122] According to certain embodiments of the first and/or second aspect of the invention, determining the nucleic acid sequence information or the presence of a mutation comprises determining the presence of a single nucleotide at a single position in a gene. Thus the invention comprises methods wherein the presence of a single nucleotide polymorphism or mutation at a single nucleotide position is detected.

[0123] According to certain embodiments, the antibiotic drug in the methods of the present invention is selected from the group consisting of Amoxicillin/K Clavulanate (AUG), Ampicillin (AM), Aztreonam (AZT), Cefazolin (CFZ), Cefepime (CPE), Cefotaxime (CFT), Ceftazidime (CAZ), Ceftriaxone (CAX), Cefuroxime (CRM), Cephalotin (CF), Ciprofloxacin (CP), Ertapenem (ETP), Gentamicin (GM), Imipenem (IMP), Levofloxacin (LVX), Meropenem (MER), Piperacillin/Tazobactam (P/T), Ampicillin/Sulbactam (A/S), Tetracycline (TE), Tobramycin (TO), and Trimethoprim/Sulfamethoxazole (T/S).

[0124] The inventors have surprisingly found that mutations in certain genes are indicative not only for a resistance to one single antimicrobial, e.g. antibiotic, drug, but to groups containing several drugs.

[0125] According to certain embodiments of the first and/or second aspect of the invention, the gene is from Table 1 or Table 2, the antibiotic drug is selected from quinolone antibiotics, preferably fluoroquinolone antibiotics, and a mutation in at least one of the following genes is detected with regard to reference genome NC_020418: MU9_880, MU9_1843, MU9_489.

[0126] According to certain embodiments of the first and/or second aspect of the invention, the gene is from Table 1 or Table 2, the antibiotic drug is selected from aminoglycoside antibiotics and a mutation in at least one of the following genes is detected with regard to reference genome NC_020418: MU9_880, MU9_1843.

[0127] According to certain embodiments of the first and/or second aspect of the invention, the gene is from Table 1 or Table 2, the antibiotic drug is selected from polyketide antibiotics, preferably tetracycline antibiotics, and a mutation in at least one of the following genes is detected with regard to reference genome NC 020418: MU9_413, MU9_425, MU9_14, MU9_3039, MU9_3029, MU9_626, MU9_3041, MU9_2759, MU9_2077, MU9_502, MU9_2754, MU9_2763, MU9_2127, MU9_1555, MU9_2124, MU9_3032, MU9_3373, MU9_1716, MU9_910, MU9_1547, MU9_3338, MU9_1556, MU9_2545, MU9_2764, MU9_146, MU9_2018, MU9_3034, MU9_1112, MU9_875, MU9_2404, MU9_718, MU9_2587, MU9_1311, MU9_1153, MU9_3478, MU9_346, MU9_3401, MU9_2177, MU9_1142, MU9_1507, MU9_2791, MU9_1456, MU9_720, MU9_63, MU9_3309, MU9_3395, MU9_911, MU9_2615, preferably MU9_413, MU9_425, MU9_14, MU9_3029, MU9_626, MU9_2759, MU9_2077, MU9_502, MU9_2754, MU9_2763, MU9_2127, MU9_1555, MU9_2124, MU9_3032, MU9_3373, MU9_1716, MU9_910, MU9_1547, MU9_3338, MU9_1556, MU9_2545, MU9_2764, MU9_146, MU9_2018, MU9_3034, MU9_1112, MU9_875, MU9_2404, MU9_718, MU9_2587, MU9_1311, MU9_1153, MU9_3478, MU9_346, MU9_3401, MU9_2177, MU9_1142, MU9_1507, MU9_2791, MU9_1456, MU9_720, MU9_63, MU9_3309, MU9_3395, MU9_911, MU9_2615.

[0128] According to certain embodiments of the first and/or second aspect of the invention, the gene is from Table 1 or Table 2, the antibiotic drug is selected from benzene derived/sulfonamide antibiotics and a mutation in at least one of the following genes is detected with regard to reference genome NC 020418: MU9_880, MU9_413, MU9_1843, MU9_425, MU9_3041, preferably MU9_413, MU9_425.

[0129] For specific antimicrobial drugs, e.g. antibiotics, specific positions in the above genes can be determined where a high statistical significance is observed. The inventors found that, apart from the above genes indicative of a resistance against antibiotics, also single nucleotide polymorphisms (=SNP's) may have a high significance for the presence of a resistance against defined antibiotic drugs. The analysis of these polymorphisms on a nucleotide level may further improve and accelerate the determination of a drug resistance to antimicrobial drugs, e.g. antibiotics, in Morganella.

[0130] According to certain embodiments of the first and/or second aspect of the invention, the gene is from Table 1 or Table 2, the antibiotic drug is selected from quinolone antibiotics, preferably fluoroquinolone antibiotics, and a mutation in at least one of the following nucleotide positions is detected with regard to reference genome NC_020418: 987896, 2075706, 546224.

[0131] According to certain embodiments of the first and/or second aspect of the invention, the gene is from Table 1 or Table 2, the antibiotic drug is selected from aminoglycoside antibiotics and a mutation in at least one of the following nucleotide positions is detected with regard to reference genome NC_020418: 987896, 2075706.

[0132] According to certain embodiments of the first and/or second aspect of the invention, the gene is from Table 1 or Table 2, the antibiotic drug is selected from polyketide antibiotics, preferably tetracycline antibiotics, and a mutation in at least one of the following nucleotide positions is detected with regard to reference genome NC_020418: 453465, 462605, 462603, 14282, 462604, 3243210, 3228648, 693707, 3244535, 2993949, 693706, 2303002, 561645, 2990262, 2997851, 3244536, 3244537, 2358613, 693542, 693635, 1772464, 693695, 2356458, 3230829, 3626894, 1948383, 693570, 1028566, 1760161, 3593257, 1773458, 2792025, 3228649, 2999901, 164042, 2251541, 3232794, 2791971, 1258668, 982378, 2634116, 795874, 2838191, 1501599, 1304861, 3736963, 378588, 3659206, 2412485, 1293791, 1705869, 1774528, 3025152, 1654789, 3232981, 800038, 69035, 3562548, 1501122, 3654810, 1030766, 2862593, preferably 453465, 462605, 462603, 14282, 462604, 3228648, 693707, 2993949, 693706, 2303002, 561645, 2990262, 2997851, 3244536, 3244537, 2358613, 693542, 693635, 1772464, 693695, 2356458, 3230829, 3626894, 1948383, 693570, 1028566, 1760161, 3593257, 1773458, 2792025, 3228649, 2999901, 164042, 2251541, 3232794, 2791971, 1258668, 982378, 2634116, 795874, 2838191, 1501599, 1304861, 3736963, 378588, 3659206, 2412485, 1293791, 1705869, 1774528, 3025152, 1654789, 3232981, 800038, 69035, 3562548, 1501122, 3654810, 1030766, 2862593.

[0133] According to certain embodiments of the first and/or second aspect of the invention, the gene is from Table 1 or Table 2, the antibiotic drug is selected from benzene derived/sulfonamide antibiotics and a mutation in at least one of the following nucleotide positions is detected with regard to reference genome NC_020418: 987896, 453465, 2075706, 462605, 462603, 462604, 3244537, preferably 453465, 462605, 462603, 462604.

[0134] According to certain embodiments of the first and/or second aspect of the invention, the antibiotic drug is at least one of CP and LVX and a mutation in at least one of the following nucleotide positions is detected with regard to reference genome NC_020418: 987896, 2075706, 546224.

[0135] According to certain embodiments of the first and/or second aspect of the invention, the antibiotic drug is at least one of GM and TO and a mutation in at least one of the following nucleotide positions is detected with regard to reference genome NC_020418: 987896, 2075706.

[0136] According to certain embodiments of the first and/or second aspect of the invention, the antibiotic drug is TE and a mutation in at least one of the following nucleotide positions is detected with regard to reference genome NC_020418: 453465, 462605, 462603, 14282, 462604, 3243210, 3228648, 693707, 3244535, 2993949, 693706, 2303002, 561645, 2990262, 2997851, 3244536, 3244537, 2358613, 693542, 693635, 1772464, 693695, 2356458, 3230829, 3626894, 1948383, 693570, 1028566, 1760161, 3593257, 1773458, 2792025, 3228649, 2999901, 164042, 2251541, 3232794, 2791971, 1258668, 982378, 2634116, 795874, 2838191, 1501599, 1304861, 3736963, 378588, 3659206, 2412485, 1293791, 1705869, 1774528, 3025152, 1654789, 3232981, 800038, 69035, 3562548, 1501122, 3654810, 1030766, 2862593, preferably 453465, 462605, 462603, 14282, 462604, 3228648, 693707, 2993949, 693706, 2303002, 561645, 2990262, 2997851, 3244536, 3244537, 2358613, 693542, 693635, 1772464, 693695, 2356458, 3230829, 3626894, 1948383, 693570, 1028566, 1760161, 3593257, 1773458, 2792025, 3228649, 2999901, 164042, 2251541, 3232794, 2791971, 1258668, 982378, 2634116, 795874, 2838191, 1501599, 1304861, 3736963, 378588, 3659206, 2412485, 1293791, 1705869, 1774528, 3025152, 1654789, 3232981, 800038, 69035, 3562548, 1501122, 3654810, 1030766, 2862593.

[0137] According to certain embodiments of the first and/or second aspect of the invention, the antibiotic drug is T/S and a mutation in at least one of the following nucleotide positions is detected with regard to reference genome NC_020418: 987896, 453465, 2075706, 462605, 462603, 462604, 3244537, preferably 453465, 462605, 462603, 462604.

[0138] According to certain embodiments of the first and/or second aspect of the invention, the resistance of a bacterial microorganism belonging to the species Morganella against 1, 2, 3, 4, 5, 6, 7, 8, 9, 10, 11, 12, 13, 14, 15 or 16, 17, 18, 19, 20 or 21 antibiotic drugs is determined.

[0139] According to certain embodiments of the first and/or second aspect of the invention, a detected mutation is a mutation leading to an altered amino acid sequence in a polypeptide derived from a respective gene in which the detected mutation is located. According to this aspect, the detected mutation thus leads to a truncated version of the polypeptide (wherein a new stop codon is created by the mutation) or a mutated version of the polypeptide having an amino acid exchange at the respective position.

[0140] According to certain embodiments of the first and/or second aspect of the invention, determining the nucleic acid sequence information or the presence of a mutation comprises determining a partial sequence or an entire sequence of the at least two genes.

[0141] According to certain embodiments of the first and/or second aspect of the invention, determining the nucleic acid sequence information or the presence of a mutation comprises determining a partial or entire sequence of the genome of the Morganella species, wherein said partial or entire sequence of the genome comprises at least a partial sequence of said at least two genes.

[0142] According to certain embodiments of the first and/or second aspect of the invention, determining the nucleic acid sequence information or the presence of a mutation comprises using a next generation sequencing or high throughput sequencing method. According to preferred embodiments of the first and/or second aspect of the invention, a partial or entire genome sequence of the bacterial organism of Morganella species is determined by using a next generation sequencing or high throughput sequencing method.

[0143] In a further, third aspect, the present invention relates to a method of determining an antimicrobial drug, e.g. antibiotic, resistance profile for bacterial microorganisms of Morganella species, comprising:

[0144] obtaining or providing a first data set of gene sequences of a plurality of clinical isolates of Morganella species;

[0145] providing a second data set of antimicrobial drug, e.g. antibiotic, resistance of the plurality of clinical isolates of Morganella species;

[0146] aligning the gene sequences of the first data set to at least one, preferably one, reference genome of Morganella, and/or assembling the gene sequence of the first data set, at least in part;

[0147] analyzing the gene sequences of the first data set for genetic variants to obtain a third data set of genetic variants;

[0148] correlating the third data set with the second data set and statistically analyzing the correlation; and

[0149] determining the genetic sites in the genome of Morganella associated with antimicrobial drug, e.g. antibiotic, resistance.

[0150] The different steps can be carried out as described with regard to the method of the first aspect of the present invention.

[0151] When referring to the second data set, wherein the second datoa set e.g. comprises, respectively is, a set of antimicrobial drug, e.g. antibiotic, resistances of a plurality of clinical isolates, this can, within the scope of the invention, also refer to a self-learning data base that, whenever a new sample is analyzed, can take this sample into the second data set and thus expand its data base. The second data set thus does not have to be static and can be expanded, either by external input or by incorporating new data due to self-learning. This is, however, not restricted to the third aspect of the invention, but applies to other aspects of the invention that refer to a second data set, which does not necessarily have to refer to antimicrobial drug resistance. The same applies, where applicable, to the first data set, e.g. in the third aspect.

[0152] According to certain embodiments, statistical analysis in the present methods is carried out using Fisher's test with p<10⁻⁶, preferably p<10⁻⁹, particularly p<10⁻¹⁰, particularly p<10⁻¹³.

[0153] The method of the third aspect of the present invention, as well as related methods, e.g. according to the 7^{th} and 10^{th} aspect, can, according to certain embodiments, comprise correlating different genetic sites to each other, e.g. in at least two, three, four, five, six, seven, eight, nine or ten genes. This way even higher statistical significance can be achieved.

[0154] According to certain embodiments of the method of the third aspect and related methods—as above, the second data set is provided by culturing the clinical isolates of Morganella species on agar plates provided with antimicrobial drugs, e.g. antibiotics, at different concentrations and the second data is obtained by taking the minimal concentration of the plates that inhibits growth of the respective Morganella species.

[0155] According to certain embodiments of the method of the third aspect and related methods, the antibiotic is at least one selected from the group of β-lactams, β-lactam inhibitors, quinolines and derivatives thereof, aminoglycosides, tetracyclines, and folate synthesis inhibitors, preferably Amoxicillin/K Clavulanate, Ampicillin, Aztreonam, Cefazolin, Cefepime, Cefotaxime, Ceftazidime, Ceftriaxone, Cefuroxime, Cephalothin, Ciprofloxacin, Ertapenem, Gentamicin, Imipenem, Levofloxacin, Meropenem, Piperacillin/Tazobactam, Ampicillin/Sulbactam, Tetracycline, Tobramycin, and Trimethoprim/Sulfamethoxazole.

[0156] According to certain embodiments of the method of the third aspect and related methods, the gene sequences in the third data set are comprised in at least one gene from the group of genes consisting of MU9_880, MU9_413, MU9_1843, MU9_425, MU9_14, MU9_3039, MU9_3029, MU9_626, MU9_3041, MU9_489, MU9_2759, MU9_2077, MU9_502, MU9_2754, MU9_2763, MU9_2127, MU9_1555, MU9_2124, MU9_3032, MU9_3373, MU9_1716, MU9_910, MU9_1547, MU9_3338, MU9_1556, MU9_2545, MU9_2764, MU9_146, MU9_2018, MU9_3034, MU9_1112, MU9_875, MU9_2404, MU9_718, MU9_2587, MU9_1311, MU9_1153, MU9_3478, MU9_346, MU9_3401, MU9_2177, MU9_1142, MU9_1507, MU9_2791, MU9_1456, MU9_720, MU9_63, MU9_3309, MU9_3395, MU9_911, and MU9_2615, preferably MU9_413, MU9_425, MU9_14, MU9_3029, MU9_626, MU9_2759, MU9_2077, MU9_502, MU9_2754, MU9_2763, MU9_2127, MU9_1555, MU9_2124, MU9_3032, MU9_3373, MU9_1716, MU9_910, MU9_1547, MU9_3338, MU9_1556, MU9_2545, MU9_2764, MU9_146, MU9_2018, MU9_3034, MU9_1112, MU9_875, MU9_2404, MU9_718, MU9_2587, MU9_1311, MU9_1153, MU9_3478, MU9_346, MU9_3401, MU9_2177, MU9_1142, MU9_1507, MU9_2791, MU9_1456, MU9_720, MU9_63, MU9_3309, MU9_3395, MU9_911, and MU9_2615, or from the genes listed in Table 5, preferably from the genes listed in Table 5a.

[0157] According to certain embodiments of the method of the third aspect and related methods, the genetic variant has a point mutation, an insertion and or deletion of up to four bases, and/or a frameshift mutation, particularly a non-synonymous coding in YP_007504299.1.

[0158] A fourth aspect of the present invention relates to a method of determining an antimicrobial drug, e.g. antibiotic, resistance profile for a bacterial microorganism belonging to the species Morganella comprising the steps of

[0159] a) obtaining or providing a sample containing or suspected of containing the bacterial microorganism;

[0160] b) determining the presence of a mutation in at least one gene of the bacterial microorganism as determined by the method of the third aspect of the invention;

[0161] wherein the presence of a mutation is indicative of a resistance to an antimicrobial drug, e.g. antibiotic, drug.

[0162] Steps a) and b) can herein be carried out as described with regard to the first aspect, as well as for the following aspects of the invention.

[0163] With this method, any mutations in the genome of Morganella species correlated with antimicrobial drug, e.g. antibiotic, resistance can be determined and a thorough antimicrobial drug, e.g. antibiotic, resistance profile can be established.

[0164] A simple read out concept for a diagnostic test as described in this aspect is shown schematically in FIG. 1.

[0165] According to FIG. 1, a sample 1, e.g. blood from a patient, is used for molecular testing 2, e.g. using next generation sequencing (NGS), and then a molecular fingerprint 3 is taken, e.g. in case of NGS a sequence of selected genomic/plasmid regions or the whole genome is assembled. This is then compared to a reference library 4, i.e. selected sequences or the whole sequence are/is compared to one or more reference sequences, and mutations (SNPs, sequence—gene additions/deletions, etc.) are correlated with susceptibility/reference profile of reference strains in the reference library. The reference library 4 herein contains many genomes and is different from a reference genome. Then the result 5 is reported comprising ID (pathogen identification), i.e. a list of all (pathogenic) species identified in the sample, and AST (antimicrobial susceptibility testing), i.e. a list including a susceptibility /resistance profile for all species listed

[0166] A fifth aspect of the present invention relates to a diagnostic method of determining an infection of a patient with Morganella species potentially resistant to antimicrobial drug treatment, which also can be described as method of determining an antimicrobial drug, e.g. antibiotic, resistant Morganella infection in a patient, comprising the steps of:

[0167] a) obtaining or providing a sample containing or suspected of containing a bacterial microorganism belonging to the species Morganella from the patient;

[0168] b) determining the presence of at least one mutation in at least one gene of the bacterial microorganism belonging to the species Morganella as determined by the method of the third aspect of the present invention, wherein the presence of said at least one mutation is indicative of an antimicrobial drug, e.g. antibiotic, resistant Morganella infection in said patient.

[0169] Again, steps a) and b) can herein be carried out as described with regard to the first aspect of the present invention.

[0170] According to this aspect, a Morganella infection in a patient can be determined using sequencing methods as well as a resistance to antimicrobial drugs, e.g. antibiotics, of the Morganella species be determined in a short amount of time compared to the conventional methods.

[0171] In a sixth aspect the present invention relates to a method of selecting a treatment of a patient suffering from an infection with a potentially resistant Morganella strain, e.g. an antimicrobial drug, e.g. antibiotic, resistant Morganella infection, comprising the steps of:

[0172] a) obtaining or providing a sample containing or suspected of containing a bacterial microorganism belonging to the species Morganella from the patient;

[0173] b) determining the presence of at least one mutation in at least one gene of the bacterial microorganism belonging to the species Morganella as determined by the method of the third aspect of the invention, wherein the presence of said at least one mutation is indicative of a resistance to one or more antimicrobial, e.g. antibiotic, drugs;

[0174] c) identifying said at least one or more antimicrobial, e.g. antibiotic, drugs; and

[0175] d) selecting one or more antimicrobial, e.g. antibiotic, drugs different from the ones identified in step c) and being suitable for the treatment of a Morganella infection.

[0176] This method can be carried out similarly to the second aspect of the invention and enables a fast was to select a suitable treatment with antibiotics for any infection with an unknown Morganella species.

[0177] A seventh aspect of the present invention relates to a method of acquiring, respectively determining, an antimicrobial drug, e.g. antibiotic, resistance profile for a bacterial microorganism of Morganella species, comprising:

[0178] obtaining or providing a first data set of gene sequences of a clinical isolate of Morganella species;

[0179] providing a second data set of antimicrobial drug, e.g. antibiotic, resistance of a plurality of clinical isolates of Morganella species;

[0180] aligning the gene sequences of the first data set to at least one, preferably one, reference genome of Morganella, and/or assembling the gene sequence of the first data set, at least in part;

[0181] analyzing the gene sequences of the first data set for genetis variants to obtain a third data set of genetic variants of the first data set;

[0182] correlating the third data set with the second data set and statistically analyzing the correlation; and

[0183] determining the genetic sites in the genome of Morganella of the first data set associated with antimicrobial drug, e.g. antibiotic, resistance.

[0184] With this method, antimicrobial drug, e.g. antibiotic, resistances in an unknown isolate of Morganella can be determined.

[0185] According to certain embodiments, the reference genome of Morganella is NC_020418 as annotated at the NCBI. According to certain embodiments, statistical analysis in the present methods is carried out using Fisher's test with p<10⁻⁶, preferably p<10⁻⁹, particularly p<10⁻¹⁰, particularly p<10⁻¹³. Also, according to certain embodiments, the method further comprises correlating different genetic sites to each other, e.g. in at least two, three, four, five, six, seven, eight, nine or ten genes.

[0186] An eighth aspect of the present invention relates to a computer program product comprising computer executable instructions which, when executed, perform a method according to the third, fourth, fifth, sixth or seventh aspect of the present invention.

[0187] In certain embodiments the computer program product is one on which program commands or program codes of a computer program for executing said method are stored. According to certain embodiments the computer program product is a storage medium. The same applies to the computer program products of the aspects mentioned afterwards, i.e. the eleventh aspect of the present invention. As noted above, the computer program products of the present invention can be self-learning, e.g. with respect to the first and second data sets.

[0188] In order to obtain the best possible information from the highly complex genetic data and develop an optimum model for diagnostic and therapeutical uses as well as the methods of the present invention—which can be applied stably in clinical routine—a thorough in silico analysis can be necessary. The proposed principle is based on a combination of different approaches, e.g. alignment with at least one, preferably more reference genomes and/or assembly of the genome and correlation of mutations found in every sample, e.g. from each patient, with all references and drugs, e.g. antibiotics, and search for mutations which occur in several drug and several strains.

[0189] Using the above steps a list of mutations as well of genes is generated. These can be stored in databases and statistical models can be derived from the databases. The statistical models can be based on at least one or more mutations at least one or more genes. Statistical models that can be trained can be combined from mutations and genes. Examples of algorithms that can produce such models are association Rules, Support Vector Machines, Decision Trees, Decision Forests, Discriminant-Analysis, Cluster-Methods, and many more.

[0190] The goal of the training is to allow a reproducible, standardized application during routine procedures.

[0191] For this, for example, a genome or parts of the genome of a microorganism can be sequenced from a patient to be diagnosed. Afterwards, core characteristics can be derived from the sequence data which can be used to predict resistance. These are the points in the database used for the final model, i.e. at least one mutation or at least one gene, but also combinations of mutations, etc.

[0192] The corresponding characteristics can be used as input for the statistical model and thus enable a prognosis for new patients. Not only the information regarding all resistances of all microorganisms, e.g. of Morganella species, against all drugs, e.g. antibiotics, can be integrated in a computer decision support tool, but also corresponding directives (e.g. EUCAST) so that only treatment proposals are made that are in line with the directives.

[0193] A ninth aspect of the present invention relates to the use of the computer program product according to the eighth aspect for acquiring an antimicrobial drug, e.g. antibiotic, resistance profile for bacterial microorganisms of Morganella species or in a method of the third aspect of the invention.

[0194] In a tenth aspect a method of selecting a treatment of a patient having an infection with a bacterial microorganism of Morganella species, comprising:

[0195] obtaining or providing a first data set comprising a gene sequence of at least one clinical isolate of the microorganism from the patient;

[0196] providing a second data set of antimicrobial drug, e.g. antibiotic, resistance of a plurality of clinical isolates of the microorganism;

[0197] aligning the gene sequences of the first data set to at least one, preferably one, reference genome of the microorganism, and/or assembling the gene sequence of the first data set, at least in part;

[0198] analyzing the gene sequences of the first data set for genetic variants to obtain a third data set of genetic variants of the first data set;

[0199] correlating the third data set with the second data set of antimicrobial drug, e.g. antibiotic, resistance of a plurality of clinical isolates of the microorganism and statistically analyzing the correlation;

[0200] determining the genetic sites in the genome of the clinical isolate of the microorganism of the first data set associated with antimicrobial drug, e.g. antibiotic, resistance; and selecting a treatment of the patient with one or more antimicrobial, e.g. antibiotic, drugs different from the ones identified in the determination of the genetic sites associated with antimicrobial drug, e.g. antibiotic, resistance is disclosed.

[0201] Again, the steps can be carried out as similar steps before. In this method, as well as similar ones, no aligning is necessary, as the unknown sample can be directly correlated, after the genome or genome sequences are produced, with the second data set and thus mutations and antimicrobial drug, e.g. antibiotic, resistances can be determined. The first data set can be assembled, for example, using known techniques.

[0202] According to certain embodiments, statistical analysis in the present method is carried out using Fisher's test with p<10⁻⁶, preferably p<10⁻⁹, particularly p<10⁻¹⁰, particularly p<10^{-1s}. Also, according to certain embodiments, the method further comprises correlating different genetic sites to each other.

[0203] An eleventh aspect of the present invention is directed to a computer program product comprising computer executable instructions which, when executed, perform a method according to the tenth aspect.

[0204] According to a twelfth aspect of the present invention, a diagnostic method of determining an infection of a patient with Morganella species potentially resistant to antimicrobial drug treatment, which can also be described as a method of determining an antimicrobial drug, e.g. antibiotic, resistant Morganella infection of a patient is disclosed, comprising the steps of:

[0205] a) obtaining or providing a sample containing or suspected of containing at least one Morganella species from the patient;

[0206] b) determining the presence of at least one mutation in at least two genes from the group of genes listed in Table 5, preferably Table 5a, wherein the presence of said at least two mutations is indicative of an antimicrobial drug, e.g. antibiotic, resistant Morganella infection in said patient.

[0207] A thirteenth aspect of the invention discloses a method of selecting a treatment of a patient suffering from an antimicrobial drug, e.g. antibiotic, resistant Morganella infection, comprising the steps of:

[0208] a) obtaining or providing a sample containing or suspected of containing at least one Morganella species from the patient;

[0209] b) determining the presence of at least one mutation in at least two genes from the group of genes listed in Table 5, preferably Table 5a, wherein the presence of said at least two mutations is indicative of a resistance to one or more antimicrobial, e.g. antibiotic, drugs;

[0210] c) identifying said at least one or more antimicrobial, e.g. antibiotic, drugs; and

[0211] d) selecting one or more antimicrobial, e.g. antibiotic, drugs different from the ones identified in step c) and being suitable for the treatment of a Morganella infection.

[0212] Again, the steps can be carried out as in similar methods before, e.g. as in the first and second aspect of the invention. In the twelfth and thirteenth aspect of the invention, all classes of antibiotics considered in the present method are covered.

[0213] Herein, the genes in Table 5 are the following: MU9_880, MU9_413, MU9_1843, MU9_425, MU9_14, MU9_3039, MU9_3029, MU9_626, MU9_3041, MU9_489, MU9_2759, MU9_2077, MU9_502, MU9_2754, MU9_2763, MU9_2127, MU9_1555, MU9_2124, MU9_3032, MU9_3373, MU9_1716, MU9_910, MU9_1547, MU9_3338, MU9_1556, MU9_2545, MU9_2764, MU9_146, MU9_2018, MU9_3034, MU9_1112, MU9_875, MU9_2404, MU9_718, MU9_2587, MU9_1311, MU9_1153, MU9_3478, MU9_346, MU9_3401, MU9_2177, MU9_1142, MU9_1507, MU9_2791, MU9_1456, MU9_720, MU9_63, MU9_3309, MU9_3395, MU9_911, MU9_433, MU9_997, MU9_143, MU9_188, MU9_1148, MU9_1797, MU9_137, MU9_1458, MU9_1018, MU9_277, MU9_3369, MU9_2966, MU9_3088, and MU9_2282.

[0214] Herein, the genes in Table 5a are the following: MU9_413, MU9_425, MU9_14, MU9_3029, MU9_626, MU9_2759, MU9_2077, MU9_502, MU9_2754, MU9_2763, MU9_2127, MU9_1555, MU9_2124, MU9_3032, MU9_3373, MU9_1716, MU9_910, MU9_1547, MU9_3338, MU9_1556, MU9_2545, MU9_2764, MU9_146, MU9_2018, MU9_3034, MU9_1112, MU9_875, MU9_2404, MU9_718, MU9_2587, MU9_1311, MU9_1153, MU9_3478, MU9_346, MU9_3401, MU9_2177, MU9_1142, MU9_1507, MU9_2791, MU9_1456, MU9_720, MU9_63, MU9_3309, MU9_3395, MU9_911, MU9_433, MU9_997, MU9_143, MU9_188, MU9_1148, MU9_1797, MU9_137, MU9_1458, MU9_1018, MU9_277, MU9_3369, MU9_2966, MU9_3088, and MU9_2282.

TABLE 5
List of genes

| | | | | | | |
|---|---|---|---|---|---|---|
| MU9_880 | MU9_413 | MU9_1843 | MU9_425 | MU9_14 | MU9_3039 | MU9_3029 |
| MU9_626 | MU9_3041 | MU9_489 | MU9_2759 | MU9_2077 | MU9_502 | MU9_2754 |
| MU9_2763 | MU9_2127 | MU9_1555 | MU9_2124 | MU9_3032 | MU9_3373 | MU9_1716 |
| MU9_910 | MU9_1547 | MU9_3338 | MU9_1556 | MU9_2545 | MU9_2764 | MU9_146 |
| MU9_2018 | MU9_3034 | MU9_1112 | MU9_875 | MU9_2404 | MU9_718 | MU9_2587 |
| MU9_1311 | MU9_1153 | MU9_3478 | MU9_346 | MU9_3401 | MU9_2177 | MU9_1142 |
| MU9_1507 | MU9_2791 | MU9_1456 | MU9_720 | MU9_63 | MU9_3309 | MU9_3395 |
| MU9_911 | MU9_433 | MU9_997 | MU9_143 | MU9_188 | MU9_1148 | MU9_1797 |
| MU9_137 | MU9_1458 | MU9_1018 | MU9_277 | MU9_3369 | MU9_2966 | MU9_3088 |
| MU9_2282 | | | | | | |

TABLE 5a
List of genes

| | | | | | | |
|---|---|---|---|---|---|---|
| MU9_2282 | MU9_413 | MU9_3088 | MU9_425 | MU9_14 | MU9_3369 | MU9_3029 |
| MU9_626 | MU9_277 | MU9_2966 | MU9_2759 | MU9_2077 | MU9_502 | MU9_2754 |
| MU9_2763 | MU9_2127 | MU9_1555 | MU9_2124 | MU9_3032 | MU9_3373 | MU9_1716 |
| MU9_910 | MU9_1547 | MU9_3338 | MU9_1556 | MU9_2545 | MU9_2764 | MU9_146 |
| MU9_2018 | MU9_3034 | MU9_1112 | MU9_875 | MU9_2404 | MU9_718 | MU9_2587 |
| MU9_1311 | MU9_1153 | MU9_3478 | MU9_346 | MU9_3401 | MU9_2177 | MU9_1142 |
| MU9_1507 | MU9_2791 | MU9_1456 | MU9_720 | MU9_63 | MU9_3309 | MU9_3395 |
| MU9_911 | MU9_433 | MU9_997 | MU9_143 | MU9_188 | MU9_1148 | MU9_1797 |
| MU9_137 | MU9_1458 | MU9_1018 | | | | |

[0215] According to certain embodiments, mutations in at least two, three, four, five, six, seven, eight, nine or ten genes are determined in any of the methods of the present invention, e.g. in at least two genes or in at least three genes. Instead of testing only single genes or mutants, a combination of several variant positions can improve the prediction accuracy and further reduce false positive findings that are influenced by other factors. Therefore, it is in particular preferred to determine the presence of a mutation in 2, 3, 4, 5, 6, 7, 8 or 9 (or more) genes selected from Table 5 preferably Table 5a.

[0216] Further, according to certain embodiments, the reference genome of Morganella is again NC_020418 as annotated at the NCBI. According to certain embodiments, statistical analysis in the present methods is carried out using Fisher's test with p<10⁻⁶, preferably p<10⁻⁹, particularly p<10⁻¹⁰, particularly p<10⁻¹³. Also, according to certain embodiments, the method further comprises correlating different genetic sites to each other. Also the other aspects of the embodiments of the first and second aspect of the invention apply.

[0217] According to certain embodiments of the method of the twelfth and/or thirteenth aspect of the present invention, as well as also of the eighteenth aspect of the present invention, the antimicrobial drug is an antibiotic.

[0218] According to certain embodiments of the method of the twelfth and/or thirteenth aspect of the present invention, as well as also of the eighteenth aspect of the present invention, the antibiotic is a quinolone antibiotic and a mutation in at least one of the genes listed in Table 6, preferably Table 6a, is detected, or a mutation in at least one of the positions (denoted POS in the tables) listed in Table 6, preferably Table 6a.

TABLE 6
List for quinolone antibiotics

| | | | p-value | genbank protein |
|---|---|---|---|---|
| gene name | POS | antibiotic | (FDR) | accession number |
| MU9_880 | 987896 | T/S; LVX; | 2.2762E−39 | YP_007504299.1 |
| | | CP; TO; | | |
| | | GM | | |
| MU9_1843 | 2075706 | T/S; LVX; | 4.72481E−24 | YP_007505262.1 |
| | | CP; TO; | | |
| | | GM | | |
| MU9_489 | 546224 | CP; LVX | 7.06616E−17 | YP_007503908.1 |
| MU9_1843 | 2075707 | CP; LVX | 4.67442E−12 | YP_007505262.1 |
| MU9_433 | 474120 | CP; LVX | 2.65262E−11 | YP_007503852.1 |
| MU9_997 | 1125417 | CP | 6.15926E−10 | YP_007504416.1 |

FDR: determined according to FDR (Benjamini Hochberg) method (Benjamini Hochberg, 1995)

TABLE 6a
List for quinolone antibiotics

| | | | p-value | genbank protein |
|---|---|---|---|---|
| gene name | POS | antibiotic | (FDR) | accession number |
| MU9_433 | 474120 | CP; LVX | 2.65262E−11 | YP_007503852.1 |
| MU9_997 | 1125417 | CP | 6.15926E−10 | YP_007504416.1 |

[0219] According to certain embodiments of the method of the twelfth and/or thirteenth aspect of the present invention, as well as also of the eighteenth aspect of the present invention, the antibiotic is at least one of CP and LVX and a mutation in at least one of the genes of MU9_880, MU9_1843, MU9_489, MU9_433, preferably MU9_433, is detected, or a mutation in at least one of the positions of987896, 2075706, 546224, 2075707, 474120, preferably 474120.

[0220] According to certain embodiments of the method of the twelfth and/or thirteenth aspect of the present invention, as well as also of the eighteenth aspect of the present invention, the antibiotic is CP and a mutation in MU9_997 is detected, or a mutation in position 1125417.

[0221] According to certain embodiments of the method of the twelfth and/or thirteenth aspect of the present invention, as well as also of the eighteenth aspect of the present invention, the antibiotic is an aminoglycoside antibiotic and a mutation in at least one of the genes listed in Table 7, preferably Table 7a, is detected, or a mutation in at least one of the positions (denoted POS in the tables) listed in Table 7, preferably Table 7a.

TABLE 7
List of aminoglycoside antibiotics

| | | | p-value | genbank protein |
|---|---|---|---|---|
| gene name | POS | antibiotic | (FDR) | accession number |
| MU9_880 | 987896 | T/S; LVX; | 2.2762E−39 | YP_007504299.1 |
| | | CP; TO; | | |
| | | GM | | |
| MU9_1843 | 2075706 | T/S; LVX; | 4.72481E−24 | YP_007505262.1 |
| | | CP; TO; | | |
| | | GM | | |
| MU9_143 | 160473 | GM | 2.05477E−11 | YP_007503562.1 |
| MU9_188 | 207261 | GM | 2.05477E−11 | YP_007503607.1 |
| MU9_1148 | 1299497 | GM | 2.05477E−11 | YP_007504567.1 |
| MU9_1797 | 2029888 | GM | 2.10851E−11 | YP_007505216.1 |
| MU9_910 | 1027484 | GM | 2.15648E−11 | YP_007504329.1 |
| MU9_137 | 152954 | GM | 2.624E−11 | YP_007503556.1 |
| MU9_1458 | 1655344 | GM | 4.08304E−11 | YP_007504877.1 |
| MU9_1018 | 1144361 | GM | 4.18588E−11 | YP_007504437.1 |
| MU9_277 | 316199 | GM | 5.94354E−11 | YP_007503696.1 |
| MU9_3369 | 3620156 | GM | 6.59239E−11 | YP_007506786.1 |
| MU9_2966 | 3166839 | GM | 6.751E−11 | YP_007506383.1 |
| MU9_3088 | 3297005 | GM | 6.78796E−11 | YP_007506505.1 |
| MU9_2282 | 2518120 | GM | 8.47279E−11 | YP_007505701.1 |

TABLE 7a
List of aminoglycoside antibiotics

| | | | p-value | genbank protein |
|---|---|---|---|---|
| gene name | POS | antibiotic | (FDR) | accession number |
| MU9_143 | 160473 | GM | 2.05477E−11 | YP_007503562.1 |
| MU9_188 | 207261 | GM | 2.05477E−11 | YP_007503607.1 |
| MU9_1148 | 1299497 | GM | 2.05477E−11 | YP_007504567.1 |
| MU9_1797 | 2029888 | GM | 2.10851E−11 | YP_007505216.1 |
| MU9_910 | 1027484 | GM | 2.15648E−11 | YP_007504329.1 |
| MU9_137 | 152954 | GM | 2.624E−11 | YP_007503556.1 |
| MU9_1458 | 1655344 | GM | 4.08304E−11 | YP_007504877.1 |
| MU9_1018 | 1144361 | GM | 4.18588E−11 | YP_007504437.1 |
| MU9_277 | 316199 | GM | 5.94354E−11 | YP_007503696.1 |
| MU9_3369 | 3620156 | GM | 6.59239E−11 | YP_007506786.1 |
| MU9_2966 | 3166839 | GM | 6.751E−11 | YP_007506383.1 |
| MU9_3088 | 3297005 | GM | 6.78796E−11 | YP_007506505.1 |
| MU9_2282 | 2518120 | GM | 8.47279E−11 | YP_007505701.1 |

[0222] According to certain embodiments of the method of the twelfth and/or thirteenth aspect of the present invention, as well as also of the eighteenth aspect of the present invention, the antibiotic is at least one of GM and TO and a mutation in at least one of the genes of MU9_880, MU9_1843 is detected, or a mutation in at least one of the positions of 987896, 2075706.

[0223] According to certain embodiments of the method of the twelfth and/or thirteenth aspect of the present invention, as well as also of the eighteenth aspect of the present invention, the antibiotic is GM and a mutation in at least one of the genes of MU9_143, MU9_188, MU9_1148, MU9_1797, MU9_910, MU9_137, MU9_1458, MU9_1018, MU9_277, MU9_3369, MU9_2966, MU9_3088, MU9_2282 is detected, or a mutation in at least one of the positions of160473, 207261, 1299497, 2029888, 1027484, 152954, 1655344, 1144361, 316199, 3620156, 3166839, 3297005, 2518120.

[0224] According to certain embodiments of the method of the twelfth and/or thirteenth aspect of the present invention, as well as also of the eighteenth aspect of the present invention, the antibiotic is an polyketide antibiotic and a mutation in at least one of the genes listed in Table 8, preferably Table 8a, is detected, or a mutation in at least one of the positions (denoted POS in the tables) listed in Table 8, preferably Table 8a.

TABLE 8
List of polyketides, preferably tetracycline

| | | | p-value | genbank protein |
|---|---|---|---|---|
| gene name | POS | antibiotic | (FDR) | accession number |
| MU9_413 | 453465 | T/S; TE | 4.62406E−33 | YP_007503832.1 |
| MU9_425 | 462605 | T/S; TE | 2.04554E−21 | YP_007503844.1 |
| MU9_425 | 462603 | T/S; TE | 2.58865E−21 | YP_007503844.1 |
| MU9_14 | 14282 | TE | 5.9115E−21 | YP_007503433.1 |
| MU9_425 | 462604 | T/S; TE | 1.55998E−20 | YP_007503844.1 |
| MU9_3039 | 3243210 | TE | 2.93657E−19 | YP_007506456.1 |
| MU9_3029 | 3228648 | TE | 3.14105E−17 | YP_007506446.1 |
| MU9_626 | 693707 | TE | 6.02031E−17 | YP_007504045.1 |
| MU9_3041 | 3244535 | TE | 6.8391E−17 | YP_007506458.1 |
| MU9_2759 | 2993949 | TE | 7.44283E−17 | YP_007506177.1 |
| MU9_626 | 693706 | TE | 8.57383E−17 | YP_007504045.1 |
| MU9_2077 | 2303002 | TE | 8.57383E−17 | YP_007505496.1 |
| MU9_502 | 561645 | TE | 1.23531E−16 | YP_007503921.1 |
| MU9_2754 | 2990262 | TE | 1.76884E−16 | YP_007506172.1 |
| MU9_2763 | 2997851 | TE | 2.22199E−16 | YP_007506181.1 |
| MU9_3041 | 3244536 | TE | 2.50339E−16 | YP_007506458.1 |
| MU9_3041 | 3244537 | T/S; TE | 2.54642E−16 | YP_007506458.1 |
| MU9_2127 | 2358613 | TE | 4.47909E−16 | YP_007505546.1 |
| MU9_626 | 693542 | TE | 5.58783E−16 | YP_007504045.1 |
| MU9_626 | 693635 | TE | 6.25967E−16 | YP_007504045.1 |
| MU9_1555 | 1772464 | TE | 6.71044E−16 | YP_007504974.1 |
| MU9_626 | 693695 | TE | 9.83228E−16 | YP_007504045.1 |
| MU9_2124 | 2356458 | TE | 1.05499E−15 | YP_007505543.1 |

TABLE 8a
List of polyketides, preferably tetracycline

| | | | p-value | genbank protein |
|---|---|---|---|---|
| gene name | POS | antibiotic | (FDR) | accession number |
| MU9_413 | 453465 | T/S; TE | 4.62406E−33 | YP_007503832.1 |
| MU9_425 | 462605 | T/S; TE | 2.04554E−21 | YP_007503844.1 |
| MU9_425 | 462603 | T/S; TE | 2.58865E−21 | YP_007503844.1 |
| MU9_14 | 14282 | TE | 5.9115E−21 | YP_007503433.1 |
| MU9_425 | 462604 | T/S; TE | 1.55998E−20 | YP_007503844.1 |
| MU9_3029 | 3228648 | TE | 3.14105E−17 | YP_007506446.1 |
| MU9_626 | 693707 | TE | 6.02031E−17 | YP_007504045.1 |
| MU9_3041 | 3244535 | TE | 6.8391E−17 | YP_007506458.1 |
| MU9_2759 | 2993949 | TE | 7.44283E−17 | YP_007506177.1 |
| MU9_626 | 693706 | TE | 8.57383E−17 | YP_007504045.1 |
| MU9_2077 | 2303002 | TE | 8.57383E−17 | YP_007505496.1 |
| MU9_502 | 561645 | TE | 1.23531E−16 | YP_007503921.1 |
| MU9_2754 | 2990262 | TE | 1.76884E−16 | YP_007506172.1 |
| MU9_2763 | 2997851 | TE | 2.22199E−16 | YP_007506181.1 |
| MU9_2127 | 2358613 | TE | 4.47909E−16 | YP_007505546.1 |
| MU9_626 | 693542 | TE | 5.58783E−16 | YP_007504045.1 |
| MU9_626 | 693635 | TE | 6.25967E−16 | YP_007504045.1 |
| MU9_1555 | 1772464 | TE | 6.71044E−16 | YP_007504974.1 |
| MU9_626 | 693695 | TE | 9.83228E−16 | YP_007504045.1 |
| MU9_2124 | 2356458 | TE | 1.05499E−15 | YP_007505543.1 |

[0225] According to certain embodiments of the method of the twelfth and/or thirteenth aspect of the present invention, as well as also of the eighteenth aspect of the present invention, the antibiotic is TE and a mutation in at least one of the genes of MU9_413, MU9_425, MU9_14, MU9_3039, MU9_3029, MU9_626, MU9_3041, MU9_2759, MU9_2077, MU9_502, MU9_2754, MU9_2763, MU9_2127, MU9_1555, MU9_2124, preferably MU9_413, MU9_425, MU9_14, MU9_3029, MU9_626, MU9_2759, MU9_2077, MU9_502, MU9_2754, MU9_2763, MU9_2127, MU9_1555, MU9_2124, is detected, or a mutation in at least one of the positions of 453465, 462605, 462603, 14282, 462604, 3243210, 3228648, 693707, 3244535, 2993949, 693706, 2303002, 561645, 2990262, 2997851, 3244536, 3244537, 2358613, 693542, 693635, 1772464, 693695, 2356458, preferably 453465, 462605, 462603, 14282, 462604, 3228648, 693707, 3244535, 2993949, 693706, 2303002, 561645, 2990262, 2997851, 2358613, 693542, 693635, 1772464, 693695, 2356458.

[0226] According to certain embodiments of the method of the twelfth and/or thirteenth aspect of the present invention, as well as also of the eighteenth aspect of the present invention, the antibiotic is T/S and a mutation in at least one of the genes listed in Table 9, preferably Table 9a, is detected, or a mutation in at least one of the positions (denoted POS in the tables) listed in Table 9, preferably Table 9a.

TABLE 9
List of others antibiotics (benzene-derived/sulfonamide)

| | | | p-value | genbank protein |
|---|---|---|---|---|
| gene name | POS | antibiotic | (FDR) | accession number |
| MU9_880 | 987896 | T/S; LVX; | 2.2762E−39 | YP_007504299.1 |
| | | CP; TO; | | |
| | | GM | | |
| MU9_413 | 453465 | T/S; TE | 4.62406E−33 | YP_007503832.1 |
| MU9_1843 | 2075706 | T/S; LVX; | 4.72481E−24 | YP_007505262.1 |
| | | CP; TO; | | |
| | | GM | | |
| MU9_425 | 462605 | T/S; TE | 2.04554E−21 | YP_007503844.1 |
| MU9_425 | 462603 | T/S; TE | 2.58865E−21 | YP_007503844.1 |
| MU9_425 | 462604 | T/S; TE | 1.55998E−20 | YP_007503844.1 |
| MU9_3041 | 3244537 | T/S; TE | 2.54642E−16 | YP_007506458.1 |

TABLE 9a
List of others antibiotics (benzene-derived/sulfonamide)

| | | | p-value | genbank protein |
|---|---|---|---|---|
| gene name | POS | antibiotic | (FDR) | accession number |
| MU9_413 | 453465 | T/S; TE | 4.62406E−33 | YP_007503832.1 |
| MU9_425 | 462605 | T/S; TE | 2.04554E−21 | YP_007503844.1 |
| MU9_425 | 462603 | T/S; TE | 2.58865E−21 | YP_007503844.1 |
| MU9_425 | 462604 | T/S; TE | 1.55998E−20 | YP_007503844.1 |

[0227] A fourteenth aspect of the present invention is directed to a diagnostic method of determining an infection of a patient with Morganella species potentially resistant to antimicrobial drug treatment, which can also be described as method of determining an antimicrobial drug, e.g. antibiotic, resistant Morganella infection of a patient, comprising the steps of:

[0228] a) obtaining or providing a sample containing or suspected of containing at least one Morganella species from the patient;

[0229] b) determining the presence of at least one mutation in at least one gene from the group of genes consisting of MU9_880, MU9_413, MU9_1843, MU9_425, MU9_14, MU9_3039, MU9_3029, MU9_626, MU9_3041, MU9_489, MU9_2759, MU9_2077, MU9_502, MU9_2754, MU9_2763, MU9_2127, MU9_1555, MU9_2124, MU9_3032, MU9_3373, MU9_1716, MU9_910, MU9_1547, MU9_3338, MU9_1556, MU9_2545, MU9_2764, MU9_146, MU9_2018, MU9_3034, MU9_1112, MU9_875, MU9_2404, MU9_718, MU9_2587, MU9_1311, MU9_1153, MU9_3478, MU9_346, MU9_3401, MU9_2177, MU9_1142, MU9_1507, MU9_2791, MU9_1456, MU9_720, MU9_63, MU9_3309, MU9_3395, MU9_911, MU9_2615, preferably MU9_413, MU9_425, MU9_14, MU9_3029, MU9_626, MU9_2759, MU9_2077, MU9_502, MU9_2754, MU9_2763, MU9_2127, MU9_1555, MU9_2124, MU9_3032, MU9_3373, MU9_1716, MU9_910, MU9_1547, MU9_3338, MU9_1556, MU9_2545, MU9_2764, MU9_146, MU9_2018, MU9_3034, MU9_1112, MU9_875, MU9_2404, MU9_718, MU9_2587, MU9_1311, MU9_1153, MU9_3478, MU9_346, MU9_3401, MU9_2177, MU9_1142, MU9_1507, MU9_2791, MU9_1456, MU9_720, MU9_63, MU9_3309, MU9_3395, MU9_911, MU9_2615, wherein the presence of said at least one mutation is indicative of an antimicrobial drug, e.g. antibiotic, resistant Morganella infection in said patient.

[0230] A fifteenth aspect of the present invention is directed to a method of selecting a treatment of a patient suffering from an antimicrobial drug, e.g. antibiotic, resistant Morganella infection, comprising the steps of:

[0231] a) obtaining or providing a sample containing or suspected of containing at least one Morganella species from the patient;

[0232] b) determining the presence of at least one mutation in at least one gene from the group of genes consisting of MU9_880, MU9_413, MU9_1843, MU9_425, MU9_14, MU9_3039, MU9_3029, MU9_626, MU9_3041, MU9_489, MU9_2759, MU9_2077, MU9_502, MU9_2754, MU9_2763, MU9_2127, MU9_1555, MU9_2124, MU9_3032, MU9_3373, MU9_1716, MU9_910, MU9_1547, MU9_3338, MU9_1556, MU9_2545, MU9_2764, MU9_146, MU9_2018, MU9_3034, MU9_1112, MU9_875, MU9_2404, MU9_718, MU9_2587, MU9_1311, MU9_1153, MU9_3478, MU9_346, MU9_3401, MU9_2177, MU9_1142, MU9_1507, MU9_2791, MU9_1456, MU9_720, MU9_63, MU9_3309, MU9_3395, MU9_911, MU9_2615, preferably MU9_413, MU9_425, MU9_14, MU9_3029, MU9_626, MU9_2759, MU9_2077, MU9_502, MU9_2754, MU9_2763, MU9_2127, MU9_1555, MU9_2124, MU9_3032, MU9_3373, MU9_1716, MU9_910, MU9_1547, MU9_3338, MU9_1556, MU9_2545, MU9_2764, MU9_146, MU9_2018, MU9_3034, MU9_1112, MU9_875, MU9_2404, MU9_718, MU9_2587, MU9_1311, MU9_1153, MU9_3478, MU9_346, MU9_3401, MU9_2177, MU9_1142, MU9_1507, MU9_2791, MU9_1456, MU9_720, MU9_63, MU9_3309, MU9_3395, MU9_911, MU9_2615, wherein the presence of said at least one mutation is indicative of a resistance to one or more antimicrobial, e.g. antibiotic, drugs;

[0233] c) identifying said at least one or more antimicrobial, e.g. antibiotic, drugs; and

[0234] d) selecting one or more antimicrobial, e.g. antibiotic, drugs different from the ones identified in step c) and being suitable for the treatment of a Morganella infection.

[0235] Again, in the fourteenth and the fifteenth aspect the steps correspond to those in the first or second aspect, although only a mutation in at least one gene is determined.

[0236] A sixteenth aspect of the present invention is directed to a method of treating a patient suffering from an antimicrobial drug, e.g. antibiotic, resistant Morganella infection, comprising the steps of:

[0237] a) obtaining or providing a sample containing or suspected of containing at least one Morganella species from the patient;

[0238] b) determining the presence of at least one mutation in at least one gene from the group of genes consisting of MU9_880, MU9_413, MU9_1843, MU9_425, MU9_14, MU9_3039, MU9_3029, MU9_626, MU9_3041, MU9_489, MU9_2759, MU9_2077, MU9_502, MU9_2754, MU9_2763, MU9_2127, MU9_1555, MU9_2124, MU9_3032, MU9_3373, MU9_1716, MU9_910, MU9_1547, MU9_3338, MU9_1556, MU9_2545, MU9_2764, MU9_146, MU9_2018, MU9_3034, MU9_1112, MU9_875, MU9_2404, MU9_718, MU9_2587, MU9_1311, MU9_1153, MU9_3478, MU9_346, MU9_3401, MU9_2177, MU9_1142, MU9_1507, MU9_2791, MU9_1456, MU9_720, MU9_63, MU9_3309, MU9_3395, MU9_911, MU9_2615, preferably MU9_413, MU9_425, MU9_14, MU9_3029, MU9_626, MU9_2759, MU9_2077, MU9_502, MU9_2754, MU9_2763, MU9_2127, MU9_1555, MU9_2124, MU9_3032, MU9_3373, MU9_1716, MU9_910, MU9_1547, MU9_3338, MU9_1556, MU9_2545, MU9_2764, MU9_146, MU9_2018, MU9_3034, MU9_1112, MU9_875, MU9_2404, MU9_718, MU9_2587, MU9_1311, MU9_1153, MU9_3478, MU9_346, MU9_3401, MU9_2177, MU9_1142, MU9_1507, MU9_2791, MU9_1456, MU9_720, MU9_63, MU9_3309, MU9_3395, MU9_911, MU9_2615, wherein the presence of said at least one mutation is indicative of a resistance to one or more antimicrobial, e.g. antibiotic, drugs;

[0239] c) identifying said at least one or more antimicrobial, e.g. antibiotic, drugs;

[0240] d) selecting one or more antimicrobial, e.g. antibiotic, drugs different from the ones identified in step c) and being suitable for the treatment of a Morganella infection; and

[0241] e) treating the patient with said one or more antimicrobial, e.g. antibiotic, drugs.

[0242] A seventeenth aspect of the present invention is directed to method of treating a patient suffering from an antimicrobial drug, e.g. antibiotic, resistant Morganella infection, comprising the steps of:

[0243] a) obtaining or providing a sample containing or suspected of containing at least one Morganella species from the patient;

[0244] b) determining the presence of at least one mutation in at least two genes from the group of genes consisting of MU9_880, MU9_413, MU9_1843, MU9_425, MU9_14, MU9_3039, MU9_3029, MU9_626, MU9_3041, MU9_489, MU9_2759, MU9_2077, MU9_502, MU9_2754, MU9_2763, MU9_2127, MU9_1555, MU9_2124, MU9_3032, MU9_3373, MU9_1716, MU9_910, MU9_1547, MU9_3338, MU9_1556, MU9_2545, MU9_2764, MU9_146, MU9_2018, MU9_3034, MU9_1112, MU9_875, MU9_2404, MU9_718, MU9_2587, MU9_1311, MU9_1153, MU9_3478, MU9_346, MU9_3401, MU9_2177, MU9_1142, MU9_1507, MU9_2791, MU9_1456, MU9_720, MU9_63, MU9_3309, MU9_3395, MU9_911, MU9_2615, preferably MU9_413, MU9_425, MU9_14, MU9_3029, MU9_626, MU9_2759, MU9_2077, MU9_502, MU9_2754, MU9_2763, MU9_2127, MU9_1555, MU9_2124, MU9_3032, MU9_3373, MU9_1716, MU9_910, MU9_1547, MU9_3338, MU9_1556, MU9_2545, MU9_2764, MU9_146, MU9_2018, MU9_3034, MU9_1112, MU9_875, MU9_2404, MU9_718, MU9_2587, MU9_1311, MU9_1153, MU9_3478, MU9_346, MU9_3401, MU9_2177, MU9_1142, MU9_1507, MU9_2791, MU9_1456, MU9_720, MU9_63, MU9_3309, MU9_3395, MU9_911, MU9_2615, wherein the presence of said at least two mutations is indicative of a resistance to one or more antimicrobial, e.g. antibiotic, drugs;

[0245] c) identifying said at least one or more antimicrobial, e.g. antibiotic, drugs;

[0246] d) selecting one or more antimicrobial, e.g. antibiotic, drugs different from the ones identified in step c) and being suitable for the treatment of a Morganella infection; and

[0247] e) treating the patient with said one or more antimicrobial, e.g. antibiotic, drugs.

[0248] An eighteenth aspect of the present invention is directed to method of treating a patient suffering from an antimicrobial drug, e.g. antibiotic, resistant Morganella infection, comprising the steps of:

[0249] a) obtaining or providing a sample containing or suspected of containing at least one Morganella species from the patient;

[0250] b) determining the presence of at least one mutation in at least two genes from the group of genes listed in Table 5, preferably Table 5a, wherein the presence of said at least two mutations is indicative of a resistance to one or more antimicrobial, e.g. antibiotic, drugs;

[0251] c) identifying said at least one or more antimicrobial, e.g. antibiotic, drugs;

[0252] d) selecting one or more antimicrobial, e.g. antibiotic, drugs different from the ones identified in step c) and being suitable for the treatment of a Morganella infection; and

[0253] e) treating the patient with said one or more antimicrobial, e.g. antibiotic, drugs.

[0254] A nineteenth aspect of the present invention is directed to method of treating a patient suffering from an antimicrobial drug, e.g. antibiotic, resistant Morganella infection, comprising the steps of:

[0255] a) obtaining or providing a sample containing or suspected of containing at least one Morganella species from the patient;

[0256] b) determining the presence of at least one mutation in at least one gene from the group of genes listed in Table 5, preferably Table 5a, wherein the presence of said at least one mutation is indicative of a resistance to one or more antimicrobial, e.g. antibiotic, drugs;

[0257] c) identifying said at least one or more antimicrobial, e.g. antibiotic, drugs;

[0258] d) selecting one or more antimicrobial, e.g. antibiotic, drugs different from the ones identified in step c) and being suitable for the treatment of a Morganella infection; and

[0259] e) treating the patient with said one or more antimicrobial, e.g. antibiotic, drugs.

[0260] Also in the sixteenth to nineteenth aspect of the invention, steps a) to d) are analogous to the steps in the method of the second aspect of the present invention. Step e) can be sufficiently carried out without being restricted and can be done e.g. non-invasively.

[0261] A twentieth aspect of the present invention is directed to a diagnostic method of determining an infection of a patient with Morganella species potentially resistant to antimicrobial drug treatment, which can also be described as method of determining an antimicrobial drug, e.g. antibiotic, resistant Morganella infection of a patient, comprising the steps of:

[0262] a) obtaining or providing a sample containing or suspected of containing at least one Morganella species from the patient;

[0263] b) determining the presence of at least one mutation in at least one gene from the group of genes listed in Table 5, preferably Table 5a, wherein the presence of said at least one mutation is indicative of an antimicrobial drug, e.g. antibiotic, resistant Morganella infection in said patient. A twenty-first aspect of the present invention is directed to a method of selecting a treatment of a patient suffering from an antimicrobial drug, e.g. antibiotic, resistant Morganella infection, comprising the steps of:

[0264] a) obtaining or providing a sample containing or suspected of containing at least one Morganella species from the patient;

[0265] b) determining the presence of at least one mutation in at least one gene from the group of genes listed in Table 5, preferably Table 5a, wherein the presence of said at least one mutation is indicative of a resistance to one or more antimicrobial, e.g. antibiotic, drugs;

[0266] c) identifying said at least one or more antimicrobial, e.g. antibiotic, drugs; and

[0267] d) selecting one or more antimicrobial, e.g. antibiotic, drugs different from the ones identified in step c) and being suitable for the treatment of a Morganella infection.

[0268] Again, in the twentieth and the twenty-first aspect the steps correspond to those in the first or second aspect, although only a mutation in at least one gene is determined.

### EXAMPLES

[0269] The present invention will now be described in detail with reference to several examples thereof. However, these examples are illustrative and do not limit the scope of the invention.

### Example 1

[0270] Whole genome sequencing was carried out in addition to classical antimicrobial susceptibility testing of the same isolates for a cohort of 300 specimens. This allowed performing genome wide correlation studies to find genetic variants (e.g. point mutations, small insertions and deletion, larger structural variants, plasmid copy number gains, gene dosage effects) in the genome and plasmids that are significantly correlated to the resistance against one or several drugs. The approach also allows for comparing the relevant sites in the genome to each other.

[0271] In the approach the different sources of genetic resistance as well as the different ways of how bacteria can become resistant were covered. By measuring clinical isolates collected in a broad geographical area and across a broad time span of three decades a complete picture going far beyond the rather artificial step of laboratory generated resistance mechanisms was tried to be generated.

[0272] To this end, a set of 21 clinically relevant antimicrobial agents with 5 different modes of action was put together, and the minimally inhibitory concentration (MIC) of the 21 drugs for the Morganella isolates was measured.

[0273] The detailed procedure is given in the following:

[0274] Bacterial Strains

[0275] The inventors selected 300 Morganella strains from the microbiology strain collection at Siemens Healthcare Diagnostics (West Sacramento, Calif.) for susceptibility testing and whole genome sequencing.

[0276] Antimicrobial Susceptibility Testing (AST) Panels Frozen reference AST panels were prepared following Clinical Laboratory Standards Institute (CLSI) recommendations. The following antimicrobial agents (with pg/ml concentrations shown in parentheses) were included in the panels: Amoxicillin/K Clavulanate (0.5/0.25-64/32), Ampicillin (0.25-128), Ampicillin/Sulbactam (0.5/0.25-64/32), Aztreonam (0.25-64), Cefazolin (0.5-32), Cefepime (0.25-64), Cefotaxime (0.25-128), Ceftazidime (0.25-64), Ceftriaxone (0.25-128), Cefuroxime (1-64), Cephalothin (1-64), Ciprofloxacin (0.015-8), Ertepenem (0.12-32), Gentamicin (0.12-32), Imipenem (0.25-32), Levofloxacin (0.25-16), Meropenem (0.12-32), Piperacillin/Tazobactam (0.25/4-256/4), Tetracycline (0.5-64), Tobramycin (0.12-32), and Trimethoprim/Sulfamethoxazole (0.25/4.7-32/608). Prior to use with clinical isolates, AST panels were tested with QC strains. AST panels were considered acceptable for testing with clinical isolates when the QC results met QC ranges described by CLSI16.

[0277] Inoculum Preparation

[0278] Isolates were cultured on trypticase soy agar with 5% sheep blood (BBL, Cockeysville, Md.) and incubated in ambient air at 35+1° C. for 18-24 h. Isolated colonies (4-5 large colonies or 5-10 small colonies) were transferred to a 3 ml Sterile Inoculum Water (Siemens) and emulsified to a final turbidity of a 0.5 McFarland standard. 2 ml of this suspension was add ed to 25 ml Inoculum Water with Pluronic-F (Siemens). Using the Inoculator (Siemens) specific for frozen AST panels, 5 μl of the cell suspension was transferred to each well of the AST panel. The inoculated AST panels were incubated in ambient air at 35+1° C. for 16-20 h. Panel results were read visually, and minimal inhibitory concentrations (MIC) were determined.

[0279] DNA Extraction

[0280] Four streaks of each Gram-negative bacterial isolate cultured on trypticase soy agar containing 5% sheep blood and cell suspensions were made in sterile 1.5 ml collection tubes containing 50 μl Nuclease-Free Water (AM9930, Life Technologies). Bacterial isolate samples were stored at −20 ° C. until nucleic acid extraction. The Tissue Preparation System (TPS) (096D0382-02_01_B, Siemens) and the VERSANT® Tissue Preparation Reagents (TPR) kit (10632404B, Siemens) were used to extract DNA from these bacterial isolates. Prior to extraction, the bacterial isolates were thawed at room temperature and were pelleted at 2000 G for 5 seconds. The DNA extraction protocol DNAext was used for complete total nucleic acid extraction of 48 isolate samples and eluates, 50 μl each, in 4 hours. The total nucleic acid eluates were then transferred into 96-Well qPCR Detection Plates (401341, Agilent Technologies) for RNase A digestion, DNA quantitation, and plate DNA concentration standardization processes. RNase A (AM2271, Life Technologies) which was diluted in nuclease-free water following manufacturer's instructions was added to 50 μl of the total nucleic acid eluate for a final working concentration of 20 μg/ml. Digestion enzyme and eluate mixture were incubated at 37° C. for 30 minutes using Siemens VERSANT® Amplification and Detection instrument. DNA from the RNase digested eluate was quantitated using the Quant-iT® PicoGreen dsDNA Assay (P11496, Life Technologies) following the assay kit instruction, and fluorescence was determined on the Siemens VERSANT® Amplification and Detection instrument. Data analysis was performed using Microsoft® Excel 2007. 25 μl of the quantitated DNA eluates were transferred into a new 96-Well PCR plate for plate DNA concentration standardization prior to library preparation. Elution buffer from the TPR kit was used to adjust DNA concentration. The standardized DNA eluate plate was then stored at −80° C. until library preparation.

[0281] Next Generation Sequencing

[0282] Prior to library preparation, quality control of isolated bacterial DNA was conducted using a Qubit 2.0 Fluorometer (Qubit dsDNA BR Assay Kit, Life Technologies) and an Agilent 2200 TapeStation (Genomic DNA ScreenTape, Agilent Technologies). NGS libraries were prepared in 96 well format using NexteraXT DNA Sample Preparation Kit and NexteraXT Index Kit for 96 Indexes (Illumina) according to the manufacturer's protocol. The resulting sequencing libraries were quantified in a qPCR-based approach using the KAPA SYBR FAST qPCR MasterMix Kit (Peqlab) on a ViiA 7 real time PCR system (Life Technologies). 96 samples were pooled per lane for paired-end sequencing (2x 100bp) on Illumina Hiseq2000 or Hiseq2500 sequencers using TruSeq PE Cluster v3 and TruSeq SBS v3 sequncing chemistry (Illumina). Basic sequencing quality parameters were determined using the FastQC quality control tool for high throughput sequence data (Babraham Bioinformatics Institute).

[0283] Data Analysis

[0284] Raw paired-end sequencing data for the 300 Morganella samples were mapped against the Morganella reference (NC_020418) with BWA 0.6.1.20. The resulting SAM files were sorted, converted to BAM files, and PCR duplicates were marked using the Picard tools package 1.104 (http://picard.sourceforge.net/). The Genome Analysis Toolkit 3.1.1 (GATK)21 was used to call SNPs and indels for blocks of 200 Morganella samples (parameters: -ploidy 1 -glm BOTH-stand_call_conf 30-stand_emit_conf 10). VCF files were combined into a single file and quality filtering for SNPs was carried out (QD<2.0∥FS>60.0∥MQ<40.0) and indels (QD<2.0∥FS>200.0). Detected variants were annotated with SnpEff22 to predict coding effects. For each annotated position, genotypes of all Morganella samples were considered. Morganella samples were split into two groups, low resistance group (having lower MIC concentration for the considered drug), and high resistance group (having higher MIC concentrations) with respect to a certain MIC concentration (breakpoint). To find the best breakpoint all thresholds were evaluated and p-values were computed with Fisher's exact test relying on a 2×2 contingency table (number of Morganella samples having the reference or variant genotype vs. number of samples belonging to the low and high resistance group). The best computed breakpoint was the threshold yielding the lowest p-value for a certain genomic position and drug. For further analyses positions with non-synonymous alterations and p-value<10^{-1s} were considered.

[0285] Since a potential reason for drug resistance is gene duplication, gene dose dependency was evaluated. For each sample the genomic coverage for each position was determined using BED Tools. Gene ranges were extracted from the reference assembly NC_020418.gff and the normalized median coverage per gene was calculated. To compare low- and high-resistance isolates the best area under the curve (AUC) value was computed. Groups of at least 20% of all samples having a median coverage larger than zero for that gene and containing more than 15 samples per group were considered in order to exclude artifacts and cases with AUC>0.75 were further evaluated.

[0286] To include data on the different ways how resistance mechanisms are acquired Morganella isolates collected over more than three decades were analyzed such that also horizontal gene transfer could potentially be discovered.

[0287] In detail, the following steps were carried out: Morganella strains to be tested were seeded on agar plates and incubated under growth conditions for 24 hours. Then, colonies were picked and incubated in growth medium in the presence of a given antibiotic drug in dilution series under growth conditions for 16-20 hours. Bacterial growth was determined by observing turbidity.

[0288] Next mutations were searched that are highly correlated with the results of the phenotypic resistance test.

[0289] For sequencing, samples were prepared using a Nextera library preparation, followed by multiplexed sequencing using the Illuminat HiSeq 2500 system, paired end sequencing. Data were mapped with BWA (Li H. and Durbin R. (2010) Fast and accurate long-read alignment with Burrows-Wheeler Transform. Bioinformatics, Epub. [PMID: 20080505])and SNP were called using samtools (Li H.*, Handsaker B.*, Wysoker A., Fennell T., Ruan J., Homer N., Marth G., Abecasis G., Durbin R. and 1000 Genome Project Data Processing Subgroup (2009) The Sequence alignment/map (SAM) format and SAMtools. Bioinformatics, 25, 2078-9. [PMID: 19505943]).

[0290] As reference genome, NC_020418 as annotated at the NCBI was determined as best suited.

[0291] The mutations were matched to the genes and the amino acid changes were calculated. Using different algorithms (SVM, homology modeling) mutations leading to amino acid changes with likely pathogenicity/resistance were calculated.

[0292] In total, whole genomes and plasmids of 300 different clinical isolates of Morganella species, particularly Morganella morganii, were sequenced, and classical antimicrobial susceptibility testing (AST) against 21 therapy forms as described above was performed for all organisms. From the classical AST a table with 300 rows (isolates) and 21 columns (MIC values for 21 drugs) was obtained. Each table entry contained the MIC for the respective isolate and the respective drug. The genetic data were mapped to different reference genomes of Morganella that have been annotated at the NCBI (http://www.ncbi.nlm.nih.gov/), and the best reference was chosen as template for the alignment—NC_020418 as annotated at the NCBI. Additionally, assemblies were carried out and it was verified that the sequenced genomes fulfil all quality criteria to become reference genomes.

[0293] Next, genetic variants were evaluated. This approach resulted in a table with the genetic sites in columns and the same isolates in 300 rows. Each table entry contained the genetic determinant at the respective site (A, C, T, G, small insertions and deletions, . . . ) for the respective isolate.

[0294] In a next step different statistical tests were carried out
[0295] 1) For comparing resistance/susceptibility to genetic sites we calculated contingency tables and determined the significance using Fishers test
[0296] 2) For comparing different sites to each other the correlation between different genetic sites were calculated
[0297] 3) For detecting gene dosage effects, e.g. loss or gain of genes (in the genome or on plasmids) the coverage (i.e. how many read map to the current position) at each site for resistant and not resistant isolates were calculated.

[0298] From the data, first the 51 genes with the best p-value were chosen for the list of mutations as well as the list of correlated antibiotic resistance, representing Tables 1 and 2.

[0299] A full list of all genetic sites, drugs, drug classes, affected genes etc. is provided in Tables 3 and 4a, 4b and 4c, wherein Table 3 corresponds to Table 1 and represents the genes having the lowest p-values after determining mutations in the genes, and Table 4, respectively Tables 4a, 4b and 4c correspond to Table 2 and represent the genes having the lowest p-values after correlating the mutations with antibiotic resistance for the respective antibiotics.

[0300] In addition, the data with the best p-values for each antibiotic class with the most antibiotic drugs as well as each antibiotic, respectively, were evaluated, being disclosed in Tables 5-9.

[0301] In Tables 3-9 the columns are designated as follows: Gene name: affected gene;

[0302] POS: genomic position of the SNP/variant in the Morganella reference genome (see above);

[0303] p-value: significance value calculated using Fishers exact test (determined according to FDR (Benjamini Hochberg) method (Benjamini Hochberg, 1995));

[0304] genbank protein accession number: (NCBI) Accession number of the corresponding protein of the genes

[0305] Also the antibiotic/drug classes, the number of significant antibiotics correlated to the mutations (over all antibiotics or over certain classes), as well as the correlated antibiotics are denoted in the Tables.

TABLE 3
Detailed results for the genes in Example 1 (corresponding to Table 1)

| | | #drug | | | genbank protein |
|---|---|---|---|---|---|
| POS | drug class | classes | p-value | gene name | accession number |
| 987896 | other (benzene derived)/sulfonamide; | 3 | 2.2762E−39 | MU9_880 | YP_007504299.1 |
| | aminoglycoside; fluoroquinolone | | | | |
| 453465 | other (benzene derived)/sulfonamide; | 2 | 4.62406E−33 | MU9_413 | YP_007503832.1 |
| | polyketide (tetracycline) | | | | |
| 2075706 | other (benzene derived)/sulfonamide; | 3 | 4.72481E−24 | MU9_1843 | YP_007505262.1 |
| | aminoglycoside; fluoroquinolone | | | | |
| 462605 | other (benzene derived)/sulfonamide; | 2 | 2.04554E−21 | MU9_425 | YP_007503844.1 |
| | polyketide (tetracycline) | | | | |
| 462603 | other (benzene derived)/sulfonamide; | 2 | 2.58865E−21 | MU9_425 | YP_007503844.1 |
| | polyketide (tetracycline) | | | | |
| 14282 | polyketide (tetracycline) | 1 | 5.9115E−21 | MU9_14 | YP_007503433.1 |
| 462604 | other (benzene derived)/sulfonamide; | 2 | 1.55998E−20 | MU9_425 | YP_007503844.1 |
| | polyketide (tetracycline) | | | | |
| 3243210 | polyketide (tetracycline) | 1 | 2.93657E−19 | MU9_3039 | YP_007506456.1 |
| 3228648 | polyketide (tetracycline) | 1 | 3.14105E−17 | MU9_3029 | YP_007506446.1 |
| 693707 | polyketide (tetracycline) | 1 | 6.02031E−17 | MU9_626 | YP_007504045.1 |
| 3244535 | polyketide (tetracycline) | 1 | 6.8391E−17 | MU9_3041 | YP_007506458.1 |
| 546224 | fluoroquinolone | 1 | 7.06616E−17 | MU9_489 | YP_007503908.1 |
| 2993949 | polyketide (tetracycline) | 1 | 7.44283E−17 | MU9_2759 | YP_007506177.1 |
| 693706 | polyketide (tetracycline) | 1 | 8.57383E−17 | MU9_626 | YP_007504045.1 |
| 2303002 | polyketide (tetracycline) | 1 | 8.57383E−17 | MU9_2077 | YP_007505496.1 |
| 561645 | polyketide (tetracycline) | 1 | 1.23531E−16 | MU9_502 | YP_007503921.1 |
| 2990262 | polyketide (tetracycline) | 1 | 1.76884E−16 | MU9_2754 | YP_007506172.1 |
| 2997851 | polyketide (tetracycline) | 1 | 2.22199E−16 | MU9_2763 | YP_007506181.1 |
| 3244536 | polyketide (tetracycline) | 1 | 2.50339E−16 | MU9_3041 | YP_007506458.1 |
| 3244537 | other (benzene derived)/sulfonamide; | 2 | 2.54642E−16 | MU9_3041 | YP_007506458.1 |
| | polyketide (tetracycline) | | | | |
| 2358613 | polyketide (tetracycline) | 1 | 4.47909E−16 | MU9_2127 | YP_007505546.1 |
| 693542 | polyketide (tetracycline) | 1 | 5.58783E−16 | MU9_626 | YP_007504045.1 |
| 693635 | polyketide (tetracycline) | 1 | 6.25967E−16 | MU9_626 | YP_007504045.1 |
| 1772464 | polyketide (tetracycline) | 1 | 6.71044E−16 | MU9_1555 | YP_007504974.1 |
| 693695 | polyketide (tetracycline) | 1 | 9.83228E−16 | MU9_626 | YP_007504045.1 |
| 2356458 | polyketide (tetracycline) | 1 | 1.05499E−15 | MU9_2124 | YP_007505543.1 |
| 3230829 | polyketide (tetracycline) | 1 | 1.0673E−15 | MU9_3032 | YP_007506449.1 |
| 3626894 | polyketide (tetracycline) | 1 | 1.14223E−15 | MU9_3373 | YP_007506790.1 |
| 1948383 | polyketide (tetracycline) | 1 | 2.2674E−15 | MU9_1716 | YP_007505135.1 |
| 693570 | polyketide (tetracycline) | 1 | 3.3463E−15 | MU9_626 | YP_007504045.1 |
| 1028566 | polyketide (tetracycline) | 1 | 4.81161E−15 | MU9_910 | YP_007504329.1 |
| 1760161 | polyketide (tetracycline) | 1 | 4.81161E−15 | MU9_1547 | YP_007504966.1 |
| 3593257 | polyketide (tetracycline) | 1 | 6.07477E−15 | MU9_3338 | YP_007506755.1 |
| 1773458 | polyketide (tetracycline) | 1 | 6.97094E−15 | MU9_1556 | YP_007504975.1 |
| 2792025 | polyketide (tetracycline) | 1 | 6.97094E−15 | MU9_2545 | YP_007505963.1 |
| 3228649 | polyketide (tetracycline) | 1 | 7.74652E−15 | MU9_3029 | YP_007506446.1 |
| 2999901 | polyketide (tetracycline) | 1 | 7.77891E−15 | MU9_2764 | YP_007506182.1 |
| 164042 | polyketide (tetracycline) | 1 | 7.95563E−15 | MU9_146 | YP_007503565.1 |
| 2251541 | polyketide (tetracycline) | 1 | 8.23773E−15 | MU9_2018 | YP_007505437.1 |
| 3232794 | polyketide (tetracycline) | 1 | 1.1498E−14 | MU9_3034 | YP_007506451.1 |
| 2791971 | polyketide (tetracycline) | 1 | 1.35999E−14 | MU9_2545 | YP_007505963.1 |
| 1258668 | polyketide (tetracycline) | 1 | 1.66912E−14 | MU9_1112 | YP_007504531.1 |
| 982378 | polyketide (tetracycline) | 1 | 1.99831E−14 | MU9_875 | YP_007504294.1 |
| 2634116 | polyketide (tetracycline) | 1 | 1.99831E−14 | MU9_2404 | YP_007505822.1 |
| 795874 | polyketide (tetracycline) | 1 | 2.08544E−14 | MU9_718 | YP_007504137.1 |
| 2838191 | polyketide (tetracycline) | 1 | 2.08544E−14 | MU9_2587 | YP_007506005.1 |
| 1501599 | polyketide (tetracycline) | 1 | 2.28347E−14 | MU9_1311 | YP_007504730.1 |
| 1304861 | polyketide (tetracycline) | 1 | 2.30988E−14 | MU9_1153 | YP_007504572.1 |
| 3736963 | polyketide (tetracycline) | 1 | 3.16381E−14 | MU9_3478 | YP_007506895.1 |
| 378588 | polyketide (tetracycline) | 1 | 3.18681E−14 | MU9_346 | YP_007503765.1 |
| 3659206 | polyketide (tetracycline) | 1 | 3.18681E−14 | MU9_3401 | YP_007506818.1 |
| 2412485 | polyketide (tetracycline) | 1 | 3.27363E−14 | MU9_2177 | YP_007505596.1 |
| 1293791 | polyketide (tetracycline) | 1 | 3.45338E−14 | MU9_1142 | YP_007504561.1 |
| 1705869 | polyketide (tetracycline) | 1 | 3.45338E−14 | MU9_1507 | YP_007504926.1 |
| 1774528 | polyketide (tetracycline) | 1 | 3.45338E−14 | MU9_1556 | YP_007504975.1 |
| 3025152 | polyketide (tetracycline) | 1 | 3.45338E−14 | MU9_2791 | YP_007506209.1 |
| 1654789 | polyketide (tetracycline) | 1 | 3.52517E−14 | MU9_1456 | YP_007504875.1 |
| 3232981 | polyketide (tetracycline) | 1 | 4.55036E−14 | MU9_3034 | YP_007506451.1 |
| 800038 | polyketide (tetracycline) | 1 | 4.78285E−14 | MU9_720 | YP_007504139.1 |
| 69035 | polyketide (tetracycline) | 1 | 4.9305E−14 | MU9_63 | YP_007503482.1 |
| 3562548 | polyketide (tetracycline) | 1 | 4.9305E−14 | MU9_3309 | YP_007506726.1 |
| 1501122 | polyketide (tetracycline) | 1 | 5.14252E−14 | MU9_1311 | YP_007504730.1 |
| 3654810 | polyketide (tetracycline) | 1 | 6.89632E−14 | MU9_3395 | YP_007506812.1 |
| 1030766 | polyketide (tetracycline) | 1 | 8.03851E−14 | MU9_911 | YP_007504330.1 |
| 2862593 | polyketide (tetracycline) | 1 | 8.03851E−14 | MU9_2615 | YP_007506033.1 |

TABLE 4a
Detailed results for the genes in Example
1 (corresponding to Table 2)

| | | | | #drug |
|---|---|---|---|---|
| POS | drug | #drugs | drug class | classes |
| 987896 | T/S; LVX; | 5 | other (benzene derived)/ | 3 |
| | CP; TO; | | sulfonamide; aminoglycoside/ | |
| | GM | | fluoroquinolone | |
| 453465 | T/S; TE | 2 | other (benzene derived)/ | 2 |
| | | | sulfonamide; polyketide | |
| | | | (tetracycline) | |
| 2075706 | T/S; LVX; | 5 | other (benzene derived)/ | 3 |
| | CP; TO; | | sulfonamide; aminoglycoside; | |
| | GM | | fluoroquinolone | |
| 462605 | T/S; TE | 2 | other (benzene derived)/ | 2 |
| | | | sulfonamide; polyketide | |
| | | | (tetracycline) | |
| 462603 | T/S; TE | 2 | other (benzene derived)/ | 2 |
| | | | sulfonamide; polyketide | |
| | | | (tetracycline) | |
| 14282 | TE | 1 | polyketide (tetracycline) | 1 |
| 462604 | T/S; TE | 2 | other (benzene derived)/ | 2 |
| | | | sulfonamide; polyketide | |
| | | | (tetracycline) | |
| 3243210 | TE | 1 | polyketide (tetracycline) | 1 |
| 3228648 | TE | 1 | polyketide (tetracycline) | 1 |
| 693707 | TE | 1 | polyketide (tetracycline) | 1 |
| 3244535 | TE | 1 | polyketide (tetracycline) | 1 |
| 546224 | CP; LVX | 2 | fluoroquinolone | 1 |
| 2993949 | TE | 1 | polyketide (tetracycline) | 1 |
| 693706 | TE | 1 | polyketide (tetracycline) | 1 |
| 2303002 | TE | 1 | polyketide (tetracycline) | 1 |
| 561645 | TE | 1 | polyketide (tetracycline) | 1 |
| 2990262 | TE | 1 | polyketide (tetracycline) | 1 |
| 2997851 | TE | 1 | polyketide (tetracycline) | 1 |
| 3244536 | TE | 1 | polyketide (tetracycline) | 1 |
| 3244537 | T/S; TE | 2 | other (benzene derived)/ | 2 |
| | | | sulfonamide; polyketide | |
| | | | (tetracycline) | |
| 2358613 | TE | 1 | polyketide (tetracycline) | 1 |
| 693542 | TE | 1 | polyketide (tetracycline) | 1 |
| 693635 | TE | 1 | polyketide (tetracycline) | 1 |
| 1772464 | TE | 1 | polyketide (tetracycline) | 1 |
| 693695 | TE | 1 | polyketide (tetracycline) | 1 |
| 2356458 | TE | 1 | polyketide (tetracycline) | 1 |
| 3230829 | TE | 1 | polyketide (tetracycline) | 1 |
| 3626894 | TE | 1 | polyketide (tetracycline) | 1 |
| 1948383 | TE | 1 | polyketide (tetracycline) | 1 |
| 693570 | TE | 1 | polyketide (tetracycline) | 1 |
| 1028566 | TE | 1 | polyketide (tetracycline) | 1 |
| 1760161 | TE | 1 | polyketide (tetracycline) | 1 |
| 3593257 | TE | 1 | polyketide (tetracycline) | 1 |
| 1773458 | TE | 1 | polyketide (tetracycline) | 1 |
| 2792025 | TE | 1 | polyketide (tetracycline) | 1 |
| 3228649 | TE | 1 | polyketide (tetracycline) | 1 |
| 2999901 | TE | 1 | polyketide (tetracycline) | 1 |
| 164042 | TE | 1 | polyketide (tetracycline) | 1 |
| 2251541 | TE | 1 | polyketide (tetracycline) | 1 |
| 3232794 | TE | 1 | polyketide (tetracycline) | 1 |
| 2791971 | TE | 1 | polyketide (tetracycline) | 1 |
| 1258668 | TE | 1 | polyketide (tetracycline) | 1 |
| 982378 | TE | 1 | polyketide (tetracycline) | 1 |
| 2634116 | TE | 1 | polyketide (tetracycline) | 1 |
| 795874 | TE | 1 | polyketide (tetracycline) | 1 |
| 2838191 | TE | 1 | polyketide (tetracycline) | 1 |
| 1501599 | TE | 1 | polyketide (tetracycline) | 1 |
| 1304861 | TE | 1 | polyketide (tetracycline) | 1 |
| 3736963 | TE | 1 | polyketide (tetracycline) | 1 |
| 378588 | TE | 1 | polyketide (tetracycline) | 1 |
| 3659206 | TE | 1 | polyketide (tetracycline) | 1 |
| 2412485 | TE | 1 | polyketide (tetracycline) | 1 |
| 1293791 | TE | 1 | polyketide (tetracycline) | 1 |
| 1705869 | TE | 1 | polyketide (tetracycline) | 1 |
| 1774528 | TE | 1 | polyketide (tetracycline) | 1 |
| 3025152 | TE | 1 | polyketide (tetracycline) | 1 |
| 1654789 | TE | 1 | polyketide (tetracycline) | 1 |
| 3232981 | TE | 1 | polyketide (tetracycline) | 1 |
| 800038 | TE | 1 | polyketide (tetracycline) | 1 |
| 69035 | TE | 1 | polyketide (tetracycline) | 1 |
| 3562548 | TE | 1 | polyketide (tetracycline) | 1 |
| 1501122 | TE | 1 | polyketide (tetracycline) | 1 |
| 3654810 | TE | 1 | polyketide (tetracycline) | 1 |
| 1030766 | TE | 1 | polyketide (tetracycline) | 1 |
| 2862593 | TE | 1 | polyketide (tetracycline) | 1 |

TABLE 4b
Detailed results for the genes in Example 1 (corresponding to Table 2, continued)

| | | | | | #significant | #significant |
|---|---|---|---|---|---|---|
| | best | #significant | #significant | #significant | polyketide | other (benzene |
| POS | drug | Lactams | fluoroquinolones | aminoglycosides | (tetracycline) | derived)/sulfonamide |
| 987896 | CP | 0 | 2 | 2 | 0 | 1 |
| 453465 | TE | 0 | 0 | 0 | 1 | 1 |
| 2075706 | CP | 0 | 2 | 2 | 0 | 1 |
| 462605 | TE | 0 | 0 | 0 | 1 | 1 |
| 462603 | TE | 0 | 0 | 0 | 1 | 1 |
| 14282 | TE | 0 | 0 | 0 | 1 | 0 |
| 462604 | TE | 0 | 0 | 0 | 1 | 1 |
| 3243210 | TE | 0 | 0 | 0 | 1 | 0 |
| 3228648 | TE | 0 | 0 | 0 | 1 | 0 |
| 693707 | TE | 0 | 0 | 0 | 1 | 0 |
| 3244535 | TE | 0 | 0 | 0 | 1 | 0 |
| 546224 | LVX | 0 | 2 | 0 | 0 | 0 |
| 2993949 | TE | 0 | 0 | 0 | 1 | 0 |
| 693706 | TE | 0 | 0 | 0 | 1 | 0 |
| 2303002 | TE | 0 | 0 | 0 | 1 | 0 |
| 561645 | TE | 0 | 0 | 0 | 1 | 0 |
| 2990262 | TE | 0 | 0 | 0 | 1 | 0 |
| 2997851 | TE | 0 | 0 | 0 | 1 | 0 |
| 3244536 | TE | 0 | 0 | 0 | 1 | 0 |
| 3244537 | TE | 0 | 0 | 0 | 1 | 1 |
| 2358613 | TE | 0 | 0 | 0 | 1 | 0 |
| 693542 | TE | 0 | 0 | 0 | 1 | 0 |
| 693635 | TE | 0 | 0 | 0 | 1 | 0 |
| 1772464 | TE | 0 | 0 | 0 | 1 | 0 |
| 693695 | TE | 0 | 0 | 0 | 1 | 0 |
| 2356458 | TE | 0 | 0 | 0 | 1 | 0 |
| 3230829 | TE | 0 | 0 | 0 | 1 | 0 |
| 3626894 | TE | 0 | 0 | 0 | 1 | 0 |
| 1948383 | TE | 0 | 0 | 0 | 1 | 0 |
| 693570 | TE | 0 | 0 | 0 | 1 | 0 |
| 1028566 | TE | 0 | 0 | 0 | 1 | 0 |
| 1760161 | TE | 0 | 0 | 0 | 1 | 0 |
| 3593257 | TE | 0 | 0 | 0 | 1 | 0 |
| 1773458 | TE | 0 | 0 | 0 | 1 | 0 |
| 2792025 | TE | 0 | 0 | 0 | 1 | 0 |
| 3228649 | TE | 0 | 0 | 0 | 1 | 0 |
| 2999901 | TE | 0 | 0 | 0 | 1 | 0 |
| 164042 | TE | 0 | 0 | 0 | 1 | 0 |
| 2251541 | TE | 0 | 0 | 0 | 1 | 0 |
| 3232794 | TE | 0 | 0 | 0 | 1 | 0 |
| 2791971 | TE | 0 | 0 | 0 | 1 | 0 |
| 1258668 | TE | 0 | 0 | 0 | 1 | 0 |
| 982378 | TE | 0 | 0 | 0 | 1 | 0 |
| 2634116 | TE | 0 | 0 | 0 | 1 | 0 |
| 795874 | TE | 0 | 0 | 0 | 1 | 0 |
| 2838191 | TE | 0 | 0 | 0 | 1 | 0 |
| 1501599 | TE | 0 | 0 | 0 | 1 | 0 |
| 1304861 | TE | 0 | 0 | 0 | 1 | 0 |
| 3736963 | TE | 0 | 0 | 0 | 1 | 0 |
| 378588 | TE | 0 | 0 | 0 | 1 | 0 |
| 3659206 | TE | 0 | 0 | 0 | 1 | 0 |
| 2412485 | TE | 0 | 0 | 0 | 1 | 0 |
| 1293791 | TE | 0 | 0 | 0 | 1 | 0 |
| 1705869 | TE | 0 | 0 | 0 | 1 | 0 |
| 1774528 | TE | 0 | 0 | 0 | 1 | 0 |
| 3025152 | TE | 0 | 0 | 0 | 1 | 0 |
| 1654789 | TE | 0 | 0 | 0 | 1 | 0 |
| 3232981 | TE | 0 | 0 | 0 | 1 | 0 |
| 800038 | TE | 0 | 0 | 0 | 1 | 0 |
| 69035 | TE | 0 | 0 | 0 | 1 | 0 |
| 3562548 | TE | 0 | 0 | 0 | 1 | 0 |
| 1501122 | TE | 0 | 0 | 0 | 1 | 0 |
| 3654810 | TE | 0 | 0 | 0 | 1 | 0 |
| 1030766 | TE | 0 | 0 | 0 | 1 | 0 |
| 2862593 | TE | 0 | 0 | 0 | 1 | 0 |

TABLE 4c
Detailed results for the genes in Example
1 (corresponding to Table 2, continued)

| | | | genbank protein |
|---|---|---|---|
| POS | p-value | gene name | accession number |
| 987896 | 2.2762E−39 | MU9_880 | YP_007504299.1 |
| 453465 | 4.62406E−33 | MU9_413 | YP_007503832.1 |
| 2075706 | 4.72481E−24 | MU9_1843 | YP_007505262.1 |
| 462605 | 2.04554E−21 | MU9_425 | YP_007503844.1 |
| 462603 | 2.58865E−21 | MU9_425 | YP_007503844.1 |
| 14282 | 5.9115E−21 | MU9_14 | YP_007503433.1 |
| 462604 | 1.55998E−20 | MU9_425 | YP_007503844.1 |
| 3243210 | 2.93657E−19 | MU9_3039 | YP_007506456.1 |
| 3228648 | 3.14105E−17 | MU9_3029 | YP_007506446.1 |
| 693707 | 6.02031E−17 | MU9_626 | YP_007504045.1 |
| 3244535 | 6.8391E−17 | MU9_3041 | YP_007506458.1 |
| 546224 | 7.06616E−17 | MU9_489 | YP_007503908.1 |
| 2993949 | 7.44283E−17 | MU9_2759 | YP_007506177.1 |
| 693706 | 8.57383E−17 | MU9_626 | YP_007504045.1 |
| 2303002 | 8.57383E−17 | MU9_2077 | YP_007505496.1 |
| 561645 | 1.23531E−16 | MU9_502 | YP_007503921.1 |
| 2990262 | 1.76884E−16 | MU9_2754 | YP_007506172.1 |
| 2997851 | 2.22199E−16 | MU9_2763 | YP_007506181.1 |
| 3244536 | 2.50339E−16 | MU9_3041 | YP_007506458.1 |
| 3244537 | 2.54642E−16 | MU9_3041 | YP_007506458.1 |
| 2358613 | 4.47909E−16 | MU9_2127 | YP_007505546.1 |
| 693542 | 5.58783E−16 | MU9_626 | YP_007504045.1 |
| 693635 | 6.25967E−16 | MU9_626 | YP_007504045.1 |
| 1772464 | 6.71044E−16 | MU9_1555 | YP_007504974.1 |
| 693695 | 9.83228E−16 | MU9_626 | YP_007504045.1 |
| 2356458 | 1.05499E−15 | MU9_2124 | YP_007505543.1 |
| 3230829 | 1.0673E−15 | MU9_3032 | YP_007506449.1 |
| 3626894 | 1.14223E−15 | MU9_3373 | YP_007506790.1 |
| 1948383 | 2.2674E−15 | MU9_1716 | YP_007505135.1 |
| 693570 | 3.3463E−15 | MU9_626 | YP_007504045.1 |
| 1028566 | 4.81161E−15 | MU9_910 | YP_007504329.1 |
| 1760161 | 4.81161E−15 | MU9_1547 | YP_007504966.1 |
| 3593257 | 6.07477E−15 | MU9_3338 | YP_007506755.1 |
| 1773458 | 6.97094E−15 | MU9_1556 | YP_007504975.1 |
| 2792025 | 6.97094E−15 | MU9_2545 | YP_007505963.1 |
| 3228649 | 7.74652E−15 | MU9_3029 | YP_007506446.1 |
| 2999901 | 7.77891E−15 | MU9_2764 | YP_007506182.1 |
| 164042 | 7.95563E−15 | MU9_146 | YP_007503565.1 |
| 2251541 | 8.23773E−15 | MU9_2018 | YP_007505437.1 |
| 3232794 | 1.1498E−14 | MU9_3034 | YP_007506451.1 |
| 2791971 | 1.35999E−14 | MU9_2545 | YP_007505963.1 |
| 1258668 | 1.66912E−14 | MU9_1112 | YP_007504531.1 |
| 982378 | 1.99831E−14 | MU9_875 | YP_007504294.1 |
| 2634116 | 1.99831E−14 | MU9_2404 | YP_007505822.1 |
| 795874 | 2.08544E−14 | MU9_718 | YP_007504137.1 |
| 2838191 | 2.08544E−14 | MU9_2587 | YP_007506005.1 |
| 1501599 | 2.28347E−14 | MU9_1311 | YP_007504730.1 |
| 1304861 | 2.30988E−14 | MU9_1153 | YP_007504572.1 |
| 3736963 | 3.16381E−14 | MU9_3478 | YP_007506895.1 |
| 378588 | 3.18681E−14 | MU9_346 | YP_007503765.1 |
| 3659206 | 3.18681E−14 | MU9_3401 | YP_007506818.1 |
| 2412485 | 3.27363E−14 | MU9_2177 | YP_007505596.1 |
| 1293791 | 3.45338E−14 | MU9_1142 | YP_007504561.1 |
| 1705869 | 3.45338E−14 | MU9_1507 | YP_007504926.1 |
| 1774528 | 3.45338E−14 | MU9_1556 | YP_007504975.1 |
| 3025152 | 3.45338E−14 | MU9_2791 | YP_007506209.1 |
| 1654789 | 3.52517E−14 | MU9_1456 | YP_007504875.1 |
| 3232981 | 4.55036E−14 | MU9_3034 | YP_007506451.1 |
| 800038 | 4.78285E−14 | MU9_720 | YP_007504139.1 |
| 69035 | 4.9305E−14 | MU9_63 | YP_007503482.1 |
| 3562548 | 4.9305E−14 | MU9_3309 | YP_007506726.1 |
| 1501122 | 5.14252E−14 | MU9_1311 | YP_007504730.1 |
| 3654810 | 6.89632E−14 | MU9_3395 | YP_007506812.1 |
| 1030766 | 8.03851E−14 | MU9_911 | YP_007504330.1 |
| 2862593 | 8.03851E−14 | MU9_2615 | YP_007506033.1 |

[0306] In addition, the data with the best p-values for each antibiotic class with the most antibiotic drugs as well as each antibiotic, respectively, were evaluated, being disclosed in Tables 5-9.

[0307] The p-value was calculated using the Fisher exact test based on contingency table with 4 fields: #samples Resistant/wild type; #samples Resistant/mutant; #samples not Resistant/wild type; #samples not Resistant/mutant

[0308] The test is based on the distribution of the samples in the 4 fields. Even distribution indicates no significance, while clustering into two fields indicates significance.

[0309] The following results were obtained
[0310] A total of 940 different correlations between genetic sites and anti-microbial agents were detected for a p-value<10⁻¹⁰.
[0311] The biggest part of these were point mutations (i.e. single base exchanges)
[0312] The highest significances (10⁻³⁹ and 10⁻³³, respectively) were reached for non-synonymous codings in YP_007504299.1 and YP_007503832.1, respectively, in particular in position 987896 and/or 453465, respectively, with regard to reference genome NC_020418 as annotated at the NCBI, being particularly a codon change aGc/aTc and/or ttC/ttG, respectively.
[0313] Besides these, insertions or deletions of up to four bases were discovered
[0314] Further, potential genetic tests for four different drug classes relating to resistances were discovered
   [0315] Quinolones, particularly Fluoroquinolones
   [0316] Aminoglycosides
   [0317] Polyketides, particularly Tetracyclines
   [0318] Folate synthesis inhibitors
[0319] Potential genetic tests for the tested drugs/drug combinations were discovered:

[0320] Amoxicillin/Clavulanate, Ampicillin, Ampicillin/Sulbactam, Aztreonam, Cefazolin, Cefepime, Ceftazidime,Cefuroxime, Cephalothin, Imipenem, Piperacillin/Tazobactam, Ciprofloxacin, Levofloxacin, Gentamycin, Tobramycin, Tetracycline, Trimethoprim/Sulfamethoxazol
[0321] Mutations were observed in 565 different genes

[0322] While in the tables only the best mutations in each gene are represented, a manifold of different SNPs has been found for each gene. Examples for multiple SNPs for two of the genes given in Table 3 are shown in the following Tables 10 and 11.

TABLE 10
Statistically significant SNPs in gene MU9_413 (genbank
protein accession number YP_007503832.1) (headers
as in Tables 3 and 4, respectively)

| | | | | best | |
|---|---|---|---|---|---|
| POS | drug | #drugs | drug class | drug | p-value |
| 453401 | TE | 1 | Polyketide* | TE | 3.5529E−010 |
| 453461 | TE | 1 | Polyketide* | TE | 1.7381E−010 |
| 453266 | TE | 1 | Polyketide* | TE | 3.5529E−010 |
| 453465 | T/S; TE | 2 | other (benzene | TE | 4.6241E−033 |
| | | | derived)/ | | |
| | | | sulfonamide; | | |
| | | | polyketide* | | |

*(tetracycline)

TABLE 11
Statistically significant SNPs in gene MU9_626 (genbank
protein accession number YP_007504045.1) (headers
as in Tables 3 and 4, respectively)

| | | | | best | |
|---|---|---|---|---|---|
| POS | drug | #drugs | drug class | drug | p-value |
| 693542 | TE | 1 | Polyketide* | TE | 5.5878E−016 |
| 692804 | TE | 1 | Polyketide* | TE | 8.5356E−010 |
| 693706 | TE | 1 | Polyketide* | TE | 8.5738E−017 |
| 693707 | TE | 1 | Polyketide* | TE | 6.0203E−017 |
| 693635 | TE | 1 | Polyketide* | TE | 6.2597E−016 |
| 693570 | TE | 1 | Polyketide* | TE | 3.3463E−015 |
| 693695 | TE | 1 | Polyketide* | TE | 9.8323E−016 |
| 693419 | TE | 1 | Polyketide* | TE | 1.0182E−010 |
| 693306 | TE | 1 | Polyketide* | TE | 8.8363E−010 |

*(tetracycline)

[0323] Similar results were obtained for other genes but are omitted for the sake of brevity.

[0324] Further, a synergistic effect of individual SNPs was demonstrated by exhaustively comparing significance levels for association of single SNPs with antibiotic susceptibility/resistance and significance levels for association of combinations of SNPs with antibiotic susceptibility/resistance. For a representative example of 2 SNPs the significance level for synergistic association of two SNPs was improved with the values given in Table 12 compared to the association of either SNP alone, given for exemplary different antibiotics.

TABLE 12
Synergistic increase for association of two SNPs

| drug | POS 1 | Ref | Alt | POS 2 | Ref | Alt | Improv [%] |
|---|---|---|---|---|---|---|---|
| CP | 2303002 | T | C | 987896 | G | T | 412.1 |
| CP | 3593257 | C | A | 987896 | G | T | 686.5 |
| CP | 3736963 | A | C, T | 987896 | G | T | 472.8 |
| CP | 14282 | C | G | 987896 | G | T | 857.3 |
| CP | 69035 | A | G, C | 987896 | G | T | 745.3 |
| CP | 1293791 | G | A | 987896 | G | T | 2115.6 |
| CP | 1258668 | C | T | 987896 | G | T | 101.6 |
| CP | 2075706 | G | T | 987896 | G | T | 1866624.1 |
| LVX | 2075706 | G | T | 987896 | G | T | 31992.8 |
| CP | 2075706 | G | T | 546224 | G | T, A | 1103971933.7 |
| LVX | 2075706 | G | T | 546224 | G | T, A | 32790108.7 |
| CP | 1773458 | A | G, T | 987896 | G | T | 5641.5 |
| CP | 1772464 | A | C, T | 987896 | G | T | 4365.1 |
| CP | 1705869 | T | C | 987896 | G | T | 558.8 |
| CP | 1654789 | TTG; T | T; G | 987896 | G | T | 6295.9 |
| CP | 2999901 | A | G | 987896 | G | T | 109.7 |
| CP | 2997851 | A | T | 987896 | G | T | 5784.5 |
| CP | 987896 | G | T | 1028566 | C | G, T | 1265.9 |
| CP | 987896 | G | T | 693707 | T | C | 33338.7 |
| CP | 987896 | G | T | 546224 | G | T, A | 25409425.2 |
| LVX | 987896 | G | T | 546224 | G | T, A | 721406.7 |
| CP | 987896 | G | T | 561645 | T | C | 1613.2 |

POS 1, 2 = position 1, 2 used for combination;
Ref = reference base;
Alt = alternated base in samples;
improv = improvement compared to minimum p-value of single SNP

[0325] For example, the improvement of 1613.2% in the last example with positions 987896 and 561645 for CP results from a p-value change from 3.32612e-25 to 2.06184e-26.

[0326] Again, similar results were obtained for other SNPs in respective genes.

[0327] A genetic test for the combined pathogen identification and antimicrobial susceptibility testing direct from the patient sample can reduce the time-to actionable result significantly from several days to hours, thereby enabling targeted treatment. Furthermore, this approach will not be restricted to central labs, but point of care devices can be developed that allow for respective tests. Such technology along with the present methods and computer program products could revolutionize the care, e.g. in intense care units or for admissions to hospitals in general. Furthermore, even applications like real time outbreak monitoring can be achieved using the present methods.

[0328] Instead of using only single variants, a combination of several variant positions can improve the prediction accuracy and further reduce false positive findings that are influenced by other factors.

[0329] Compared to approaches using MALDI-TOF MS, the present approach has the advantage that it covers almost the complete genome and thus enables us to identify the potential genomic sites that might be related to resistance. While MALDI-TOF MS can also be used to identify point mutations in bacterial proteins, this technology only detects a subset of proteins and of these not all are equally well covered. In addition, the identification and differentiation of certain related strains is not always feasible.

[0330] The present method allows computing a best breakpoint for the separation of isolates into resistant and susceptible groups. The inventors designed a flexible software tool that allows to consider—besides the best breakpoints—also values defined by different guidelines (e.g. European and US guidelines), preparing for an application of the GAST in different countries.

[0331] The inventors demonstrate that the present approach is capable of identifying mutations in genes that are already known as drug targets, as well as detecting potential new target sites.

[0332] The current approach enables
[0333] a. Identification and validation of markers for genetic identification and susceptibility/resistance testing within one diagnostic test
[0334] b. validation of known drug targets and modes of action
[0335] c. detection of potentially novel resistance mechanisms leading to putative novel target/secondary target genes for new therapies

The application's sequence listing, which the Patent Office published only in electronic form, follows.

SEQUENCE LISTING (1 sequence)

SEQ ID NO: 1 - DNA, 3799539 bp, Morganella morganii subsp. morganii KT (residues 1-1,899,770 of 3,799,539)
  misc_feature (867406)..(867406): n is a, c, g, or t
  misc_feature (1380998)..(1380998): n is a, c, g, or t
  misc_feature (1498246)..(1498246): n is a, c, g, or t
  misc_feature (1499005)..(1499005): n is a, c, g, or t
  misc_feature (2881279)..(2881279): n is a, c, g, or t
catggcgacggccatctgcggcgcaattcacggcattgacagttttgatgctgacagtatcgcattgataaatcatacaaataatatcgattttacgccgtatgcccgccgtctggcacagttcagacaggagtatgccgcgacgaacaggatgatgtcatgagtcagcaatctgtaccttcagcgttgaacaaaaccgatccgaccatcgaagaactggggatcggcctgatcccgccttcccggcagaccaaaaaacccgccgaactgttctttgtctggtgtgccgctaatatcggcattctcggcgtggtctacggcgcgattattgtgtcgttcgggctgtccttctttcagtcggttttagcggcagtggttggtgtcgcctcctttattttagtggggatcaccagtatcgccggtaaaatcggccggaccaccaccctcaccctttcccgcgccagcttcggcaaaagcggtaatatcgcgccgacggctttctgctggtttaacctgatgggctgggaagcggtgaatatcatcaccggcaccctgaccctggcggcgctgttcaccgccatcgggctgggcagcggacacctgatgaccgctatcgcgctgatactgttcggcggactgacggtgctggtcagtattctcgggcagaacaccgttttgctgatgcagaaatggatcacgcgtattttcggggcgatgaccctgtttgtcgtcctctggctgcttgcgaccgcagactggcaggcgctgatcagccgtccttccggtaactggatcaccggtttcctgcctgcggtgtccattatcgccgccggaaccgggatcagctgggcgattgccggggcagattacagccgtgaccagagcccgtcctcatcccacagccgtattttcggctcagtggtcggcggggccgcactgccgctgttacttctgatcctgaccggtattctgctgaccgcgcaactgcctgatctggcagcggaagagaacccgattgccgcaatcggcggtctgctgccgtcctggatggcggtgccgtatctggccgctgcggtggcagggattgtcactatcgccgtcctcagcctctattccgccagtctcaacctgctgagcatgggcatcaaactcaaacagcgcaccgccgttgctcttgatggcgtgattgtgctggcgatcgcgatttatgttctgtttgtttccggtgatttcctcgggccgtttatttcattcctggtgttctgcggattgttcctcgcatcctgggcggcgatttttatcaccgattactactgcaaacacaaaaccgccggttacgacgaagtttcgctctacggcgacaccggggttatctggccgaccttcctgtgctggctcggcggctcggttgccgggctgctggtcaccaacaccggctttattaacggaccgtttgccaccggtgtgtttgagaattccagtctggggctgtttgtctccttcctggtgagcatggcggcgtaccgcctgacactgatgataaaaccggtacggagttaaacggaactgatggatgtaacattactgacaccacagcgcccggtcgtggttatcggcgcggctttcggcgatgtgatgctggaagtgaatgcactgccgcacagcggggatgatatcagcgccctgccgctcgggcagcagatcggcggctgcgcctttaatgtcgcccgcgcgctgagccgtctcggtattacaccggtcaatggcattcccgccggaaacggcagttggggaaaacaggtcaccgccgcgatggaaaaggaaaatctgccggttctgctgcgccatccgacgcacgataacggctggtgtctggcgctggtggaggaaagcaaagaacgcacattcatcaccatcgaaggctgtgagcagcactggagtgacgcgctgctcgcacaaattccggtaccggacaatgccctgatttatgtctccggttacgaactggtcagtccggaaagcgcgccgctgcgcaactggctgctggcacagagtgcggataaaaccctgtttgcggatttcggtccgcgtctgcgggacattgatccggactttattgaaaagctgctggcgaaaaagccgctgctgaccgtcaaccgtgatgagctggcacagctcaatccgcagggcggaaaacagtctgagatacagacagacgatgcacaggcgtttgccgacagctacggcctgccgctgatcgcccgctttgataaagaaggcgctgtggtgtgccagccgggacaacagccggtcagaatcccggcgtacaaagtgccggtagccgataccattgccgccggagacagccactgtgccggtgttctcgccggactggcctgcggacaaccgctcacggatgccgtacggaccggtaatgcggtggcggccattgtggtcagccgcccgggctctgacggcgcacccacccgctctgaactgagtgagtttttacatcaccacctctgaaacaccgcccgtttacccgacagcgatgttcactcagcccccggattccgggggtttttctttcagtaactgatcgatatcagcagatcatcgatgttttcaatcacttcgcggctggcatcttccattgccgacaaatgcagttcttcatcatgaagtgagcccttcgcccgggcttccagcgccaggcgcccggaaagatgtaccagccggtgcggcctttccagtttccggtaggcatcatggccggtaaaccgctgtccttcgtccgcgtaataccatttgccgagacggcactgtgtgtggtcattaaccgataaatcagcgtttccgtccagcaggcggcggtagatatcccctttccagataacatgatccagtttgacggtattgagaaattgctgcaccgccacaaaccggatgatcgcctccatccgcgaagaaatggtgatcatactctgtaagcgttcgtccgtctgaaccgcaatattacggatacagctcaccagcttctggttatcttccgcatccgtataaatcgagttggcatgtgactttattttgccggtaaaagcggtgatattgatggcttcgttctgaatttcgccggataattgttttatttcccgggcgatgaccgaaaacccggccccccggctgccgacatgggaagcttcaatcgctgagttaaccgccagcaggttcgtctggttggccaggcgttcgatattattaatgttctgattaatctgccccagcactgagatcagcttttgtgtgtaatcaagccctttatccgcgtgctcactgatatcatccagcacactgcacaactcctgcatgtagcggcgtgtttcactgttatgcagcgcgatttcatccagagtgccctgctccccggcaagccgggtgccggaatccagcagagaattgcggataatttctatcaccgccataccctccagcaaatgccggcacaaaatttcaccgtgaacgcactgctgttcatcactgtctgccatcaccgctcgcgttgccggttccggaaaaaccgccggcacttccccggggattgcggactgtttcttttgcagaaaaaaccattttttcattatattcagcatgttaattccggttaagacagataacacaactcagggaaatagcgcagattgccgccggggacacattaactatcggcggagaaaacggaggctttatgcagacggcggggagtgataaaaacggcagcggattttaataacccgctgccggagagtgaaaacagaagtgttacaggaaggcgaagaacagcataccgacaagcgccccggtggttcccaggatggtttccatcagtgtccaggtcttcagggtctgtgcttcggtggcaccggtaaatttaccgaacagccagaaaccggagtcgttcacgtggctcagcacaatagagccgcccgcgatacaaacagacagagccgccagctgtgcgccggaatagcccagttcaccgataaccggcagtaccagaccgacggtggtcagacaggcaacggttgcagagccctggatcacacggacggcggcagagaggacaaaacaggcagcagcaatcggcagccccgcaccaatcagtgattcacccagtgccggacctacgccggaatccaccagcacctgtttgaacacaccgccggcaccggtcaccagcaggataatcccggctggctgaatagcagcagaacagatttccatgactttattgcggctcatgccacggcggattgccaggccgtaaatcgccaccagacaggcaatcaggatcgccaggaacgggtgtccgataaacaccagccaggcgtgcagttttgaatccggatccaccatcggcgcagcaatggttttcagaccgaccagtaccagcgggaacagtaccagcgccaggctcaggccaaacgatggcatcttgtgttgtccgagagccggttcagtcagatcttccggcagctccagggtgacaaatttactgataaagttaccaaacagcggtcctgccaggatcatacccggaatcgccgcacacaggccgatcaggatcatccagccgaagtctgcattcatctggtctgccagcagcatcggggtcggtcccggcagcaggaagcaggcagccgccgccacaccggcaaacagcgggatagccaggcgcaccacgttaccgccggtacgacgggcaacagcgaagaccacaccgatcagcaggacaatcgccacatcaaagaacagcggcagagcgcagataagcccggcgatccccagcgcgtaatgcgcccgtttttcaccgaaggaattcagtagtttgacagctatctggtcgagtgcgccggtttcatgcaggattttgccgaacatcgccccgagcgcgaccactatcgccaggaaaccgagcgtgccgcccatgccgttctgcatggtctgtgtgatctgctccagcggcatgccggaaaacagccccgcgccgatagccacaatcatcagtgccacgaacgcatgcagccgcgccaccatcaccaggaacagcagcagtaataccgacccggcggcggttaacaccagggttaatgttgtcatgactgacctccggaaacctgtctgataatctgaaccgcgcccgcaatcacatcctcaagcggcggctgaatgtccagcacctgtacatcctgctctgcggcagtgtccggtgcttctaaggtatcgaactgtgtgatcagcatttccggtttgaagaaatgccctttgcgggctttcaggcggctttcgatcagctcaaaatcccctttcagccagataaatgacaggtttttgttctggcggcgcaggatatcgcggtagctttttttcagcgccgaacagacaatcaccgaaagctcattggtccgctgcatagcaaaaatcgcgtcgttgatggctttcagccacggttcgcgatcggcatcattcagcgggtgcccggccgccattttttcgatattggcacgcggatgcaggtaatccccgtccagaaaggccgcattcagcccggtcgcaaccccgttagccacagcggattttccgcagccggaaacccccatcaaaacaaaggcgtgatgtggtttttggctatcactcataacaattcctcttatgcggtcattatcaccggatatgttaccggtaactattaccggtaacattaccaacggatatggttacaatgcaatcaaacactgttttcggatgaacaaattgtgacagttatctcaaatgaaattcctgtcacttcaggaagggccgggagccgttaaatactctctcccggtaataattcgaagccgacatccactatctgctgaggcggcagttcgccgcgcagacgcgccagcagcacttcagccgcacggcggcccatcaggtcacgaggtgtgaggacactcgccagtttcggggtcatcacacggccgacatcatggccgtggaacccggcaaccgccagatcctgcggaatacggatcccgaggcgctgacactcaaaaacagccccgatagcaaggtcatcgttggtacagaacagcccgtcagcatccggataatcggctctgacctggtgcagttgtctcgcccccagcgaatacgaagagctttcctgcgtcatcacattacccggttcaagcccggcatcccgcatggcctgtacataaccctgaaggcgcatgaatgtccgttcgtcatgacgcgcgccgagataaatcacacggcggcagccgcgtgcaatcatggcctgcgtcatttcatacgcggcgcgcatgttatccagcccgacggcggaatcatagcaaggggagacgctgtccatcagctcaaccaccgggatcccggcggtggccagcattttcagggtgcgcggggtgtgggtgcgttcggccaggatcaggccgtcaatattgtaagacaacagggagaccaggcgatcttcttctttctccgcctgatagccgtagtgcgccagcatcgtctgataaccggcggcatccgtcacggtttcgataccgcggatcacttccgcaaacacctggttggtcagcgaaggcagcagcacgccgatagcccggctggtggcattggatagaatatccggcacccggttcgggatataccccagttcatcgagggtacgggcaatcgtgccgcgcagtttttcggaaacctgttcagggttacgcaaaaagcggctgatagtcattttggttacaccaacgcggtcagccacgtcctgtaacgaagggcgttttttcttcatagtgcttatcttaatacagactggtctgtgtgtcgttatatccgccgaaagaggccgtagttataccgtattccgcccggaattttaccttgttttgacttacttccctatttaccgctgattttattgactcacctcatgctctgcgctaacgtccgctgtataacaatacatataacgataatgacgactgatcacgatgacacttaaccgcctctgctccggatttcttttctgctgcgcactgctgttcactttcccggcattgtcagccgctgccgcaccggaaaccgcctctcaggtttttatttatggtcagcttccgccgccggaagccattcaccgtgtggtcagcagcggcccgccgactgatcagctgctgtttgcggtcgccccggaaaaactgccgggctttgcttctctgtcggtaaaaaataacccgtattttgctccccgctggcgcgcgctgccggtcaccggacgcctctccggacgcggcagtaccctttcccctgaaaccctgctggcgcaggcaccggatgtgattgttgacagcggactgaccgatgacacttaccgctctcaggccgcccgtttcagccgccagaccggtattccgtatattctgttatccggcaatctgacacaaaccccggatctgctgcgtcaggccggtgcattgctgggggaagcagaacgcacggaacaacaggcacagctggcggagaaatggctgctggatgctgctgcttttgctgatcgtcagacacacaaacgccgtttttatctggctcgcggcgcgaaaggcctgcaaaccggtctgcgtggttcgattcacagcgaagccccggaattactggggtttgagaatgtcgcggatgtcccggatatgcagggactggcggaagtctctttcgaacagttactgcagtggaacccggattttattatcgcccaggatgccgtgacgtatgatgccattatgcagggtgaggtctggcagagcctggatgcagtgaagaataagcaggtattttactatgccgggctgccgttcggctggctcgacagcccgccggggctgaaccggcttttaggactgcgccgccttcaggcacagtttgagccggagagtaccgatctgaaagcagacaccggtttgtttttcagtttgttctatcactctccgctatcggaggcacagattaacagtctgttatccgcccgatgaccacctccgccaaaaccctgttactgcttgtgctgctggtgctggtcaccggcattgctctgaatgttggtaagttctcactgactccacagcagctgtgggatgtgatccaggcaaaaatcaccggcaacagcggcgcggatgatccggcactgagccgcgatatgacggtcttctggcaaatccgtctgccgcgcattgccgccgcactgattatcggcggcggactggcgatagccggggcggcgtatcagggcatgttccgtaacccgctggtttcaccggatattctgggtgtttccgcaggtgccggggttggtgcgatcctcggaatttttgcaggtcagtcaatgctcactatccagctgttcgccttcaccggcgggctgtgtgtggttgccctggtctattctgtcgcccggctggcgcgtcagcatgatccggtactggcgctggtgctggtcgggatcgctgtcagcgccctgtgcggctcggccatttccctgatgaaaattctggccgatccctatacccaactgcccgccatgaccttctggctgctcggcggcctgtccgcgatttcaccggatgatattaaaaccaccgccccgctgattttcgccgggatggtgccgcttctgttgctgcgctggcgtatgaatctgctcagcctgagtgatgaagaagcccgcgcactcgggttgaatgtcaccgtgacgcggctgatttttattgcctccgccaccctgatcaccgcaagtgcggtctctgtcgcgggaattatcggctggctcgggctgattatcccgcatatcacccgcttgttagtgggtgctaacttcagccaccagttgccggtgtcactgctgatcggcgccatcatgctgctgctgacagacacactggcacgcaccattgccccgattgaactgccgctcggcattctgacatctgcggtcggcgcacctttctttatttttctgctgttgcagacccggaggaacggatgagcgatgtcctgaccacccgcggcctggcggtcggctacggagagaagttaatactcactgacataaatctgcaattacatcagggagaaattatctgtctgctcggtgccaacggctgcggcaaaaccacgctgatgaaaaccctgctcggcctgttaccaccaaaggccggggagatccgcattgataacacaccgctgcgtgactggagtgccgccgcactcgcccgccgcgttgcctatgtgccgcaggcgcacaatatgccgttttctttccgggtggcggatatggtcgcactcggacgcagtgcccatctctccctgtttgccgccccgggacgcgctgaacggcagatggcagagcaggaactggatcatatggggatcgcccatctggcacagcgctcctattcctgcctgagcggcggggaaaaacagctggtactgattgcccgcgcccttgtacaacagccggggctgctgattatggatgaaccggcggccagcctcgatttcggcaatcagataaaattactgaataaaatcgaacagttacgtgagagagggatcaccgtgctgatgtccacccaccacccgcagcatgcggccgccgtggcagacagcattgtgatgctcagcaaagacagccccgcctgccaggataaacctgccgcgctgctcacaccggaaaccctggcggcactctatcatgtgacaccagaacatattgctgcccacttcgcgcagccagcttataagggatgctcatgactattgatgatatcgatttcgcacaactctaccgcgcccatctcgcacaggccgaacgtacccgcaaagatccggaacactgggacaaacgtgcggagaaaatggcacaaaactgtgcgaatcccgccgatccgtacctgatccgctttaaagagattgtcgataccaccggcgcgaaaaccctgctggatgtcggctgcgggccgggctctgtcgcgttgcagctggcagacagctttgagcaggtcaccggtattgattacagcgaagggatgctgaaagtcgcgcgtcagcgggctgagactcagggctgctcacacgtcaccttccgtcactgcgcctgggaagatgactggtcagccctgccgccgtgcgatatcgctgtggcttcccgctccaccctggtgatggatttacaggccgcgctgctgaaactgaaccgtcacgcgcggctgcgggtttacaccacccacactgtcagcccgacatttgtcgatatccgcgtgatccgcgccatcggccgcacaccggtcacactgccgacttatatttacgcggtgaatattctcaaccagctcggcattcatccggatgtggaatttatccgcagtccgaactgccagagccgcgacaatatgacctttgagcagtttgccgaaggtgtgatctggtcgctgggacagcttgatgaccatgaaatgacactgctgcgccgctattacgaccagcaggcggctgacggcctgccggtggtgccggccacccgcgactgggccatggtttcctggagtgtggtaccggaatccgccctgctgctgccgggaggtcagaagtgatctactacagtgatgcctttctggacagcctcctgctggaggacatccattacggtgatctcaccacccgcgcactcggcatcggcgcacagagcggggaaatgcacttttcccgcaagcaggccggttatgtcagcgggctgacattgggtcagaagttactggaaaaactcggattacagacacaattacacgctaatgacggcgatcatacggaagtaggcgctctgctgctgaccgcaaccggtcgtgcggaagcactgcatcagggctggaagattgtccagaatgtgattgagtggagcagcggcgtgacacagatgacccgctgcatggtggatacccttcgtcagtatcagccggacgcacagctggcctgcacccgtaaaaatatccccggtaccaagctgctggcaaccgctgctgtactggccgggaaaggcattattcaccgtcagggctgcgcggaaactattctgctgtttgccaatcaccgccgtttcctggcagagccggaaaactggtgtgcagcgattgcaacattgcgccgtgaagccccggaaaagaccattattgccgaagcggacaatccggatgaagcttatcaggcgctgaaaggccgccctgatgtgctgcaactggataaattcagtcctgatgatatccgccgtctcgtcaaagacgcggcggtgctggcaccggactgcacactgtctgctgcaggcgggctgaatgcagagaccatcggacagtatgcggataccggcgtgaagctgtttgtcacgtccgcgccgtattatgcgtccccggcggatattaaagtccggttatatccgcgctgacggaaaaccgcacaaccttatagtgagttaagggataaaccggtcaggtcactgaaccggccgttttatccttttgttttgcaagtcgttatataaataaatacatatcggtaacaggaaaaataacaatgaaacgaactctactctgctcagctattctgctggcaaccgcgcctgcggtacaggcagaaagcgcagatattctgaccgtctggggcagcccggtggcctccaatccggatgtcatcacacagccgcagatgcagtcgctgaacaaaaccaatgcggcgacagccatcagcaccatgccgggtgtggttctcgaaaaatccggcaatcgtaatgagctgaccgttaaagtccgtggttttgacagccgccaggtgccggtgttcttcgacgggatcccgacttatgtcccgtatgacggcaaccttgacctcggccgctttatggccagcgaactggaaagtattgaggtgagcaaaggttatacctcgctgttacagggcccgaacctgatgggcggtgcaatcaacctcaccaccgccaccccgaaaaaaccgtttgaggccaacgtatcattcagccagggcttcgcacgcggcgcggataatgcctataacaccagcgcccgtgtcggcgcacgcagcgaccccgggtttatccaggtcagcggcagccagtacaaacagcgtttcctcggcctgccgggctccgatgatgacaatgccctggctggcagcaacggccgccgtgcgcactcctcatccgatgataaacgcggcatggtgaaagtgggctggaccccgcgtgaaaccgatcagtatgtctttacctatctgaagcaggatggcagcaaagacagttcgccgtctgcggtgccgggcaaaggcaaatacagctggtgggaatggccggattacaacaaagagagctactatttcaacagcaccactcagctgacagacggcgtaaacctccagggccgcctgttccatgacaagtttgaaaataccctgctgatgtataaaaaagacggcaaagggtacgattacagctattacgatgatttcagcaacggtgcctctctccagttagggatcgacatgcgtgaacgtgatctgctgtcattctccgcgcactggaaagatgacgttcaccgcgcacagaaacagcgtaacggggatattctgcgttacaaagatcgcacttattctgtcgccaccgaataccagtgggcggccacgtctgatctcgattttatcggtgccatcggctatgactggcgcgaaagccgtcaggcggataaaggtgcggatgataatgatcagcacgcgtttaactgggaagtgatgtcaaaatacacgttcgccaaccaggacaacgtgcggttctccgtgtctgaccgcagccgcttcccgacacagaaagagcgctataccactgaaaaaccaaaagacggttcgctgggtatcattaacccgaacctgaaagccgaacgcgcactgaccttcgatttaacctatgaagggaatatcaccgataaatggggctaccaggccagcatctatcacaaccgagtggatgatgcgatcctcgcgcacacagtgattaaaaacggtgaccgctacttccagaaccagaacagtggccgtgtggattacaccgggctggatctgggcgtgaaaggcgaagtcagtgactggctgaaaaccgggatcaactacagctacatccacagtgatccgaaagatgttgatcatgctgaagggctgccgaagcataaaatgtatgcctgggtgaaagtcacaccgatagagccgctgtcgatcaccctgtccgaagagttccgtgcctggagctatcagtataacgacaataatgacaaagtggccggttatgctcttaccggcctgcgcgtggattatgacttcggttacggcatttccgccaatgcctccgttaataacctgtttgataaatcctacgagtacaccaacggctatatggaagaaggccgtaacttctggctgggcgtggaataccgctattaatcagcaggacgctttttgtgcaaagccccccgtttcggggggctttctgtattttcagactgacggggagagtgtcattccgccgcccgccgcttcccggcggttgatctgacgcagcaggaaggttgccaccacacccagcagcgcacaggcgaccgaaagcataaagatatagctgtagccggtttcgccgtatttatccagccagtagccggcaacggaataatagaacgcgtccggggaaaagccgataaaggaggcaaaacccaccaccgcgccggtggttttcatcgggattttcgattctgcaacagaggcaaaatagataccgcggaaggcaaacagtaacgcactcagtaccaccatattcaccaccgcaaaccacataaaggcgttacctttcgggatcacgaggaacagagcacagttcacggccatgatgataaagccgacaaacatcacactgatagatgatccgactttatccgtcacgatccccgccaccggagaggccaccattttgatcacataggtgcggataattgacagcgccgtcaccagggtaattggtaccacatatacctgtgacagatacgggctgagatacgtcaggctggagaacaccacataagtggagaaaataatcagcccgatcagccacgccttcggcatgctcaccacactcatcagcgaacggaatgtggttttttcttccggttcgccgctgtcagtggtactgctgcggtgcgcgatcaggaagaacagcagcacgccgcagatcacagaagcgccggagtaaagccagacgacgtaacggaagccgattgccgcctcggcaaatttgccgaagaaatagagaccggtgaacgagatcagtgtgccggatacgccggagagtccttcgtaaaacccgaagatccgcccctgctctttctccgtaccctgcatccgcaccactttgatcgatgcggcgaagaatgtcaggatcgtcgtgacaccccacagaatgtggatcagcaggatcgtgttatacgacgggaaggtcgcaaaccagaatcccagtgacccggaggcgatcagcgagaaggtgatcaggttgcgcagtgaaaaacgatccgcaaaccagccgccgaaaaagtaggaaaacataccgatcaggccatacagactgagcaggttaccgatctcaatgtgtgtcagccccagcgcctgctgcatcggatcatagaacgaagacttcaggtaaggcaggctgtacattgcggtggtaccgaatgccagcagaaacagaatcagcatccgtctgacgcgggattgatttgccatgtgatttgccataattattatctctttttatcagccgtgaactgcatccagggcctggcggaaatccgcaataatgtcttttgctgattcaagtccgacagcaatacggatcaggttttcgccgttcatctggaccagggtgtgctcttcacccagactggtggcaatggtggtcagtttcagggagttcacaaatttgcggctcacctggtcgcgggtcaggccgtgaatgtcctctttcagacggaaagagacaataccgccgccgaggccgttcatctgtgactgacacagttcataatgcggatggtttttcagtgccgggtagcggacttcttcgatttcgctctgagatgtcaggaattccgccagtgccaggccgttttcgcagtgttttttcatgcgcatatcgagggttttcatcccgcgcataatcatccaggcattgtttggtgccagtgccgcgccggtaaagcagcataatcccggccatttgatcagttcgatcagctcgcgggagccgataaccgcaccgcccagggtatcaccgtgaccgttcataaacttggtcaggctgtgaaccaccagatccgcacccagctccagcgggcgttgcaggatcggcgtacagaaggtgctgtcaacaatcagcaggcttttgttatgatgggcaatgtctgccaccgcgcggatatccaccagctccagagacggattaagcgggctttccacatacacgagttttgtcgccggtttcatggcagcgcggatattgtcactgaccgtggcatcagtgaaggtgatttccacgccgaatttcgccagcagttctgtcatcagcaatcgggtgtgggagaagatcccgtccgcgctgacaatatgatcgccggttttcaccagtgacagcagggttgaggcaatcgcccccatgccggatgcgctgacaatcgcactgtccgccccttccagcatcgccagtttgctctccagttcagtcaggttcgggttgcactcgcggctgtagacatagccccatgtccggcacaattcttcaaaatgctccacagaatgcgccgcaaatgtggcggtctggtagataggactggccagcgcgccggtggccggatccggtgaatgaccctggtggatcagtttggtttccaaatcataatcagtatttttttgcacaacagactcctcatgagatcagcactctgatccgcatgtcatcatttattatcattagtgagttcgggttgctgattcaggatcagcgggggtaatagtgtggcggtaacgacctttttaaccattgctgtaatgtggataactatagactctccagctactatagagtcaattcagagatagtagatgcacatcacaaaacgggtaattatacggtgaatagaagcaaaacaagctgaacaatgtcagcctgtttctgtattgaaagcattaatacctatagcagagggagagttttacaccaggcagcgggtatcaatttcacgccgtttcactttgatctgaatttctgtcagcaactggcgctcatcattggtggaaagcgggtcaatcaccgggatttcatacatcatgtcatccaccggaatgcgtttgtattccgcataatccgtcagcgctttaaatgctgccgtattttcgctgtaagacccctgatacatcaggcagataaattcaccgtcgggaatttctgtaattttgtcctgcacctgcggattaaacaggtcgcgctcgacaatcacaaaactgttcagataatgcacctgctgtgtggccagaaattcttcgcgggagaccagaccactgacgccgccgtagaaaatagaaatgttttcctcgaggatattggcaatgtgccgccgtgagaactccatggtctcctcaaagctcagaccgggctcataattcatcgataaaatatgacggcgcggaatataacggcgggtgattttgccgatactgtcggtatcaatccctttttccagtgtctcttttttggtggagaggacttttttaatcagctccagctcgcggattttctcatccaccacggaaattttccgggtcagcaggctgagaatttgtgtgtcgctgtcttccaggcggtgtttgatctctttcagcggcatacccaggtatttcagatacttaataatatccagctgagaaaactgatcgatagtgtaatagcggtagttactttcctgatcgacatacaccgggcggaacagccccagctggtcatagtaacgcagtgtctgaatgctgattttatggagctttgccatctcaccgatggaaaaatatttcgccatattgtgccgcctctgatgaacgtctcaggaattaaccggcggcacaataacggaaacaagggggatggtgcaaggtgtcagatcacactcccggcggttcgcgggagacactgttgcgttccatatagagtgtccggctcgggaaagcaaagtccgcaccgttgcggtgcacaatctcaataatcttcagatacaccgcctgctgtgctgccagccactctgcccagaccgtggttttggtaaagcagtacaccataatattgagggcggaatcaccgaattcatcaaaatagaccagcaatgtctggtgctgatcaatgctgctctccgctttcagcatagcgcgtatttcactgacaatctgcgaaattttctccgcatcttcatagcgcagcccgatggtggttttgatccgccggttggtcatgcgccccgggttttccacactgatggaggagaacagcgagttcggaatatagagcgggcggtgatcaaaggtaatgattttggtgatacgccagccgatttccaccaccgtcccttctatctgccggtcaggcgaactgacccagtcaccaattttaaacgggcggtcaaaatagagcatgatgccggagaagaggttgctgagaatatctttccccgccataccgatggcaataccaccgataccgccgaaggtcagcaggccggacaggctcatgccgaagtgctcgccgtagaacaggaacaccacaatcacaatcaggattttcagtacacgggagacaatatgtgccgaagtgatatcgctgccgcgtttgatttgtgcggcagccaggcggtttatcatcaggaacagtttgcggatcagcatcagcacaatcagtgtggtgcagatcatcccgaccgtatctgcggtgataaaacgccactgaaagtggtcaatcccctgttcggcgaaatccccgaggataatgacccccagcgcccacatgataaactgggaaacatgtactaatgtggcatgctcgcccttttcccgtttacggttataaatcatcagcccgccggaaccgagcagacacagcaccagcacaatcaggctgagcacattattggagagaaactcttcggtaatcacgataactccttagtattatcctctccttctaacggattttgcccagaaactcaatttatcctgccatctgttaaggatgttcagccagcttatttttgaaattgcacatccggaacggtggtgacttccgcttcattttcaacgctgaagttcggtttgccggtgtatcccatgtagttcgcaataatcacggccgggaatttccggatagtggtgttgtattcacggacactttcgatatagcggccgcgcgcaacggcgatccggttttcactgccttccagctgtaccattaagtcgctgtagagtgcgttacttttcagatccggatagcgttctgatactgccagcaggcgggagagcgaggagccgagttcagtctgcgcctgctggaatttggcgagcagtgccgggtcgctcaggtcactgacattgatattcatctgcccgacttttgcccgtgcattcacaacatcctgtaagacctgacgttcaaagtccgaggaagcctgcacggttttcaccagattcgggatcaggtccgcgcggcgtttgtattggttgagcatttcagaggcggaggcggtcaccgcttcgtcctgtgtctggatgctgttgtaattggagaccagcagtacgccgaccagcaccaccacacccagtaatccgataatcagttgtttcatcgtattttccttatctcagtggcgactattattcaggcaatccgccgtggattcaagataaagctaactgattgctttccatgtgttattggtgattacggtgttacgctgataaccggtaaaagcagaaagccgctgtaaacacatccgtgttatacgctaaatcatttcgttcagagtaaggcggcaagtgaaggggcacggggagcatacaccagtatgtgacccgtgcccctgaatgcggccaacgcggctatggacgaaaggatgacgcgtatacgctaaatcattccgttcagagcaaggcggcaaagtgagaacatccggggagcatacatcagtatgtgacccggatggacgaacgaagccaacgcagctatggacggaaggatgacgcgtatttaccaggcccggacagcatcgcctttatacacctcatcggcctttttcagcacctcatcactctggaatgccgcgaccagttttttcagcttctcattatctttatctgctgctctgaccacaatcaggttcacatacggggaatcagccccttccataaacagaccgtcacgggcggcggataatccgacctgagatgagaagttattgttgataatggagagatacacatccgggtcatcgagtgtgcgggtcagttgcggggtatcgatctccgcaaacttcagtttcttcggattttcaatgatatccagggtggtcggcagataaccgacgccgtctttcagtttaatcagcccctgagcctgtaacaacagcaggctgcggccgagcgtggtggcttcgttagagatagccactgttgcaccgtccggcagttcggctgcggatttgattttctttgagtatgccgctatcgggaagataaaagttttaccaataacttcaaactgatagccacgttctttgctttgcgcctcatagtacggcacggtctggaatgcattggcatccacatcattgttgcgcagcgcttcattcggcaggacatagtcattaaaggcgataacatcaacatccagcccctgcttctccttagcgactttgaccacttcttcccagatagcctgatccggcccggtgttaatcgccactttcagtggtttttcatcgtcattctgcgagcacgacacggccagtaatgtggtgcaggcgagcagtgccgatacaataatttttctcatactatctccggaacatattgttatggttatattttattgattgttaatattatttcgcactgtccagtgccgcactgatatccgccaggatgtcatcaatgtgctcaataccgatggacaaccggatcatatcctgtgataccccggcacgggccagttcggcttcattcagctgacggtgggtggtggtggccggatggcaggccagggatttcgcatcaccgatattgaccagacggacaatcagtttcagggcatcgataaacttcgctcctgcttctgctccgcctttgatgccgaaagacataattgatgccggtgtgcctttcacgtatttttttgccagtgcatgttcaggactatctgccagacccgcatatttcacccaggcaacctgcggatgttgttgcaggtattgcgcaacacgcagggcatttccggtatgacgttccatgcgcagcgccagtgtttccagtccctgcagaatcagaaagctgttaaacggcgacagtgctgcgccggtattacgcagtggcgccacacgacagcgggcgataaatgccgccgcaccgaagtgttcgctgtagttcacgccgtggtaggaaggatccggggtattcagaaccgcaaagcgatccgcatgctgctgccacgggaattttccggagtcgataacaatcccgcccagtgatgaaccgtgtccgccgatatatttggtcaatgaatgcaccacaatatccgcgccgaattcaatcgggcggcacagcgccggagaggcaacggtgttatcgacaatcagcggaacgccgtgacggtgagcgatttccgccagtttttcaatatcagcgatatgccccgccgggttggaaatggtttcgcagaaaacggctttggtattgtcatcaatcagcgattccagctgtgcgaaatcatcatgatcagcaaaacggacgtcgatcccgatgcgcggaaaattatgcgcaaacaaattatacgtgccgccatagagtttggagacactgataatattgtcgccgacgccggccagggtctggatcgcataggtgatcgccgccatgcccgatgccaccgccagcccggcaattccgccctccagagccgccacacgctgctccagcacatcattggtcgggttcatgatacgggtgtagatattcccggggactttcagatcaaacaaatccgcgccatgctgtgtgtcatcaaaggcataggaggtggtctgatagataggaaccgcgacggatttggtggtcggatccggcgaataaccggcatggacagagagcgtttcaagtttcatgtgttcttccttaccgcacaggtgaatatttttatttagacgtccagacgtttagacattcctttgttataccggtattcactgccgggatcaaaaccgaagtggcaaaacatgatgaattttcttcatgatgagaaagaacatgaaaaagccgctgtcagaagcggcccggatttatgagcacagaagagattatgtccgcatattattaagcaagttaccagatgtcgcctgcttgttatcaagataacggttaaacatatccattacttttttatttaattcatgcgcgtcattagaagctttaccatgaacggaaccgcttttcagcttcagatctttttgcgcgcgaacaacttcagcatcaccctgtaactcagtaacctgcttctgaataaattgtacgaatacctggctaaccggctgggacagtccggacatggcctgccccgctattccgccgggtgtcggtgccgtcggattagccacatcaatcccctttattgacatagcagcaccgacaatagaaataccaatagaaactaacgcaccggtgacggctgctttgacctgaagttcggcttccttatatttcatattttttaattcttttgccagttcaataacagctacatccagcttattctggcgttcctgctggctcagtgaatcatcattcagtactttgcataattctatggctaatttcatccatttctgatcactgacagataacagagagggcatcagcgagcctgcacgggtacggatctcagcagaaatttgctcatctgtaacttctgtgctctttatactgttattttttgtaatctcttttataacttcaggatcaatatttatttcctgtaaatctttttttactgaaataatactatcaatttccggtgaataaacctgcttcgtattatttgctgtggttatcgtcgtcataataaattcctttttaaattaaacagctaatggccctgactgtataatagccttcttacgctgaaaatcgtcttttcctatcttacctaactgctctttcattttatttaaatcctgctgtgattctgaaaaagctgccattattttttccatcaattccatcaacttatccagcaattcctgatctaaatctatatcagcgtttaatttcattacatctttattaagttctgcctgagtgactgaatttataccgttaacgacagtagatgtcagcatcattgaaattaataatcttttaacctccaccattacctgtctcaatatttcctttaccgattctgataccacctgaccgataacttttccggcaacagcacctgcagcagcaaacaccgccatcacaacaacaactgcaagtaccatggcaataatttccattttttcttccagtttttttaactcagccggtggcagcccaagtttttggccaattttcatagccatatctttaataaacttctggacaacttccaccaattttgtcaccggtgtcattattgttgccataatatccgggccacccgccgccttaacaatttcactaataatagtgacaaccacaatcactgcggccagtgcttttgccagtaaaccaccagtcagagcagttaatataaccattaatgcgatcaataatggccctaaccatttaaaaagggcctgtaaacgctctgctttttttattttttttgccatttcagctccgtcagcatcggttttatcctgcaatgttttttgctgaattgtggctataagacgatcattttcaagtttacgctgtgctagcttattccgcagatctgctattttacccatcaaaatagttaatgatttactataattcatatcagacttacgctgagagccgaatatatcagaaatatctttcacaatatctttcgcttcatcctgaagagcggccatttcatgtaatgaatttaattcagccgtaatctcctcacgatttccggcaatgagagaaccgagttcatcacccagcacaggaaatttattcatctcatcagaaaatgatttaaataacttggttttatccttataaagcactgactccgaattgatatttttaataacttcatcggcatttgttttacttcttaaatataaagaaatttcatctttacttttaaacttatcaacaccattaccggttaatttatttttcagctcaccatccggcatctttcccaacagctcactgcccatttgagagaaataatactctgccgttgcttcaatatggtcattaatcaaatccccagattcagaaataagctctgataattgatttactttattatcagaccataattccttgatgaatttaagattgtacccatgagctcttgaattaattttaaatttctcttcagaataaaaaaccgtcagcaatgaatgtaattcattaagtgaaaatccaccttttttcttacccgtagtatctttactgtctgtggtatccttactttccggggtatttttactttccgtagtactttcactgcctgcggtatctttatttaactttgggttatccaatttcggtttatttaattctgattttttctttccatcattagctgatgttgattttttactaacatcactaaccatcaccttgctaaactctccgataggatcgttaacacgattttgtttatttgcacctgaatttttatttacactttcacttgacgttgtggtatttaaaacaccaaaatctgatgttttatcaataattacagtcatacaattccctttttatatcagaatcttaaaaatccctttaattcctgagccaattcgctaatcattgttgtaattgttctcagcatattgtcatagttactatttatagtgttataccgctgagtgtattcatccaacgttaattgaagtcctttcttagccccatctattttttgattcatactatttatttcatgttgataaaacttagaatattcatttctttcttcttcattttcataataactaatgaatcctgcatcatagttttttttcaaaatttccctggtatattttacatcactggtagccgctattgatttttcattaacattattccaccttgataaatctggtgatttatccttgaaacatttatcaaaattttcatttatacgattaagtcctttttcatcgctcgctaagtccataaaactataaagttcataaggaaatagaaactgttcaaccttcccttctaagccaataacattattaaattcatccagtacgggtttaaatattttacataatttagtccctttaataaccggctcatgacaagaaaagaaatattccatttttccatatgcatctttatatgataaattttcttctattactttatcatcaaccagaacattaaatttatcgtcaccgaccttaactatcttcatactacctgtatataaagtatggccaacagaatctccataataaaaataaggtttcatagtgttgtataattcagtataaaactttcttttatataccttattctgctttccatcattgatgggctcatcaatataatcaccaaatgtatttaattttgttgctacgcttttataataatcaacatatttgttcataccttcgcgctgatatttaactgaaatatcataagcatacacactgacattatccattctctcaacaaagtaaccaaatgtgaccatatccctaatgataaaatactcctgaatacctttatttatcaatcttattttctctgaaatattatcaccagcattattaattgcctttatattttctttatccttcattaatatatcatatgcttcaagttcttttaatgcttgttctcttgtagtgtcaggatccgacagaatataattaatcctatctaattcgctataaatttgttttactttatcttcataaaagtgctcccaaaatctacccgccatagatttaatctgttcttgttcaattctatcaacaatcaccctcgttttattaatcaatccctcacactcttcatgcattataactttatttttaatattattcttaaagttactatcatttactatatcgtagtattctcttatatatttcacagcatcatcatacggaattctctctgtaaccgtgagcgcatcatatattatcttaagcctcataaaatcattatgcaatgaggaattataactgagatcatcaacttctttatttactttcaacctattttccaaacgcataatccaccttccagcattgatatataatgtattgcttgttcccgctcattatcattacacgctaatgaaaggcaatgattgaaactgcttatcgctgattctttctcacctgtgtataaatagcattgtcctgcatacaaatatatcgatgcattgttttcatctaaattaatagctaaactataaagattaatcgctttctgatattgtttttgcacctgtttaactgcagctaatccaagtaaataatccacattgctaaagtcatataaacagagtgaacgaaaaatattctcagcttgttctataagccctttatcataataatcacacgccagagaataaacatccgaaaaatcctcattattctttggcatcagaagatcagaaatgtttccactttccagatgaggaaaaatattcccgatcagagatttaatatcaaaatctgtattgtcatccataacaaaaaccccttaataatattggattatcaagtcaggcaatactatctgacccggctgataatcactttcataaaatacgcctcagcaccatcctgctgatacatattagtgcggttcactatcggcaagtgcagcctgctctgcgtcattcagccacagtaagagatcgagaaacttatccagatcatcatcaataatggtgtcaaagacatgatatttccggaataacgtccgggccaggcggatatcccggacaaccggcaccctgtgcttttcggcatagcagcgcacagccagcgcatacacgcctttctctttcacggtaatgagcggcataacgccgttttccggatcaagatagatagcaacggcaatatgcgtcgggttaaccaccacgatatccgaattctttatcaatgctttggtttccgcattcagcaattctctgtgctgctgtttgcgggctgattttatttcctgattaccttcgctgtttttatactcttgtttaacttcatgcttttccattttcatgtcattaaaaaagaaaaaatattcaacgatgtaatcaaccaccagcagtggcatcagcagcaggataaaaataaagatatagcggccggtgaaatagagaaagctctcactcacttcagagaaaagtgccgtaattaactgataaatatcgccggtatacagagtaataaaggtataaccggcagataaatacacaatgagtgatatcagtgcttttaccagatttttcagggattttttggtaaaaatccgtttgaatccggcgatgggatcaattttctttaaatcaaatttaatcgcttccgtcgcaacagcaaaacgggtctgcatcagagaaacaaagctgacactcaatccgcataatataatcagcggtaacaccatctgaaaaaagatatccgataacatctgtatataaacagagagtgacaagtgattcacattacgcaataccgtctgataaaaacgggagaatgctgaccagtcagcaacgtaaagcagatacgctattcccgtcacatagccggttgtggagagcagttctttatatttgaacgtattcccttttttcgattcgtcctttagtttcttactggtgggtttttcggttttttcagccatcgttccccctcaaaaagtgagtcagaggggaagtatcaaacagcactgtcacatccgtcattgttgtgctgcgaaacagcagcagcgccagcagaaaggcaataatactttttattgaaagtgataaggaaaacggattcagttgtgaattgtacagggccagaatgcccaggctgacttcagaaataaataagataatcagtaccggcatacaaaacagcaaagagagtgacaggctgtttgtcagccagtcaaataccgccgcataatggatttccgtcagcaatgtacccggcggtaacaaccggaaactatcctgaacggatgtcatcagtaacacaaaaccgtcattgagcaaaaaaaacgagacagaaaacagattcataaaggtggaaaacggtgatgcatcggtccctgttgtcggatcagcggtatcactgatattcgccccccgttggttatcaatatattcaccgaaggcggaaaaaataaaaaacggcgtgctgtaaaccaaccccattaccatgccggtaatgatctcactcagtatattgaccactgagaactctgccgccgggtagtctccatttccgctgagacactgcgccatgagaaaaataataatgccccgcgtggtccggctgaggataaatttatcattcagaaacggcaaaaaagagaacgccgcaaataaccgcacactacttaacagcgcgttctgaaaaaggtcatgaagccaggagaataacgacaccgggaactaacctgccgctgttgcgctgagcgccagtgagaacatttcacgggcataactgagcatcgaatcccccagccagctgagctgcatcaggatgcagacaaacacagcaatcaatttcagcccgaagggcagtgtctgctcctggatctgcgtgacagtctgcagcaggccgaccgtcagacccacgacggtcgccacactcaccggcagcagcgataacataatcaccagataaattcctttatccgctgcataaatcacatccatgttatatgtccataagttcgagatactgagacaccagactggtggataacagcgaccagccatcaagggcaataaataagatcagtttgatcggtaccgagagtgtgaccgggctcatcatcatcatccccagcgccagcaaaacgctggacaccacgagatcaatcacgataaacggcagatagagatagaagctgatcagaaaagcagatttgatttcccccagcgcataggcggccagcaggggaaagaatgcgatatcacgggcatcactcagttccggttcagcatcctcatcaacgtctgtttgcgcaaaaaaatacagcagaggtttatcggcataacggaagagatagtcccggtaatcctgtaacccctcatccgtaaaacgcgacagtgattccggctgagataattccaccggattttcattaatatacgcataggttttactgaccagcggaaacatcaccaccatcgccagaataaacgcaatcgcattgagtaccatatttgacggcacctgctgaacccccagggcgttgcgcaccatcacaaaaacaatggaaaatttgaggtagcaggttccggccgccagaataaagggcagaacagatgctgcggccagcatcagcatcatcgaaacagcgctgtcagtcatcattcacccttatgaaagatatgatgaatttccacggcgtattgttccccgatacgtaccagttccccctgtgcaaaacgctgcccgctgatttccagcgtgatcaggtgattatccgccgccggcagcggcagtgtatcgcccggttgcagcgccatcagttccgataacggaaacactctgcggtactgcaggaaatccacctgaaccggcactctgcggctgtcaaaaactgccgtttccgctgtggtagccggcacttccggaataattccgcgtccggtgataaccgtgtcctcctgctcctgtttcagtgtcatctgaaaatagcctcctgctctcagaaatcgctggtattgtgtaataaaaaggatatcgccttcattgatttgctgaatcacacccgtgaatgcccgggttgaaccgatataaatcccggcattcaccggaacagagagatccggggtcagtggcgggccattaatatcaaaccggccacgggcgccaatcagagtgaaatcaatatttccctgacggaaagcaagtttacgggttggattaacagcgatgttttccgtcctgaactcaggaaaataactctccgctgaaaaaaaaggcagccgaatctctttcttattttcatttatcaggtcaataagataattttcaggaacgatttcccaggggatcgtattttcaccaatcagttcagaaaaaaaggattcaacatcaattaaaacctccaatatattttgagtattaattaaatgacatttaatcgtgcgtttggtattttcttttttttccggcagataacagctcagatagtccattatctgatgggtatcataatgcatttatttcatccgcttatattatatcaatattatcaattccgtttatatttactgctgatttcagtcgtcgcttcagggattctgaatatgtttctaatttaaaccctcccggattatctctgtaaatatgaaccggttccggtggctgatatttctgtctgaaatgataagagcaataataatcagctctgctgtacgccggagataacgcatttttctccgtatggtaaacgaacaggggtattttttcctgagtacctcttccctgttcataatgccgcaatggctgattttttacttccgtctttatccccggaggcggatggttcagaaaaaacggtatttccggtaactcagttgttgcactgcccgccggtatcttttcttctgctgagatatcagcgcctgaataatcttcctcctctgccggaacgttttttggtttatccgctgatagcatgttatgtgagatatcaccggaaggttccgtggcgacattatccctgaatatactgttctttattttattattttccggatataccagtataacatcatgaactttccggtgatgattgctatgattttttctcatccccccgggatataatatatcgccatgataacatttatcatcatacggacagaacagtgaataaatcaccgggatagcactgtcatgtttattttcttttttattttttgtcattccggataaaaaatcagtcacccgttgattaacatgaccttccggaaaatcttgctcagcttccaggcaacaacgattaatattcattacagcgtcctgcttatatttaaaaaataaattcattgtttattatattgttcaaacttaataagtttctttctcagattatttattgttttattactctcagcaatatcatccgagatttgcgccagctgaagggatgattcatccactctggcacggacatccgggatctgtttacgatagattgcctgtttgcgcctgagttcattcagtgcggtgtacgataataatccgcggcattcaaactcaaggatctgctgttctaatcctttgattaacaacaatagcttatctttattttcctgttcctgccggtagcgctggtgcagctgtgccagtgccgcccggacacagcgctctttcagactgaaatgcgcgatcagttgctgtaattcattgtgtgagctgttcaagtaatctgcctgtttcatccgccgcaacggattccgccggtgactgacacaaaaaatggcgcatcggcagagtgagctcaaccgctttatcattctccgcattcagcctgggtttatattctcctagctccaccagcagtttcagctcattctgtttcgccagcagtgtccggaaatgcccggcagccgccagatgctgcggtgaaacaatctgtgacatgacacggctgatgctggccgggatatcaatcgccggatagtgattctgcatcgccagtcgccgggagagataaatatgtccgtcgagaatggaacggacttcatcgccaaagccgtccggctcattctcgctatcaagtaaaacagtatagaaagccgtgatcacgccggttttcgtcgcccccgggcgctccagcagtgccggtaactgctcaaataccgatgccggataccccagcctgacaggaacttccccggcactcagtgccacatcccttaacgcccgcccgtagcgtgtcagtgaatcaacaaagaggatcacctctttcccctcatcacggtaatattccgccagtgaggttgccaccagcgccgcattacagcggtcaaccgccggtttatcggatgtcgagcagaccaggatacattttgccgcctgcgggctgttgcgcagttcatcaatcagttcggtcacttcccggccgcgttcgccaatcagggctatcacaaaaatatcggcttgcgcatgctcaatcagcatattcatcagcacggttttaccgcagccggcaccggcaaaaatccccagccgctggccttttccgcaggtcagcagagcatcaatggctttcacaccggtcggcaaaatctccgtgatacgctgccgggagagcacatccggcgcctcaccgctgacggggcggatgatactccggttatccggctctgttatctcactcagacgggccagggtattaccggacggatcaatcaccgagcccggaatttgcggtgtgaatgtcagtgttactgcactacccgtcggtgcgataaccgttgtcagtgtcagcccggcggcctgtccgatcagactcagcagcgtgttgtgttcattaaagcccaccacctgagcccggccgagcagtacgcgacaggtaacatcctgccataacagacaaatttccccgataaagacatccggcaacggcgcttccagataatacccgcggatatgcaccggaaatgcccgctgactgagcagtgcattcagcatcgtcagcctctgaggatcagtgtgtgacactgctgactgaggcggacaaactgatccagcgcctgcacaaaaggttccgcgccgctgacagcattgtgactgaaacatccgaccagctccgcaccgttatctgtctgccgcagcgccggtgagcccggataaaacagaggggcgggttcttctgtcagaatatccagcaaaccgccttttacctccggccgcaatgccggtaaatcagtctgcaacggcgtccagataaccggatattcatcaaccaccgcaatatgaatgacctgctgttcccccagcgataatgagattgttgaatgattatcgagtgagctgccttccggcaccaaatcaccgcgtccgataagcttcattccttctgtaaccagtgttgcaagatccatcttcagtttccttgttataacattaaacagagtcaatcaccgacacctgcgccgacggaacaatttcagaaaatgacagcacggcaatacccggatagtgcatttcagtcagtttccggacaaagcggcggacatccattgccgtcaggaaaacaatatcccgccggtgccgcagcggcgtcatcaccaatgacatcgcatcataaaaatgatccagctgcgccggttcgagattgataaaagtacctccggcagactggcggatcccctgacggatcatctcctccagcgggtttgacagcaccaccgcccgcaggacctgatcacaggcaaaatgcgctgagatgtaacgggcaagatggctgcggacgtgctcaaccagtaccagcggatctttttctttctgcccccactgcaccagtgcgccgaggataattttgatattacggacagagatctgctcagcgataagccgctgaaagacatccgcaatacgctgaacagataaatagcggtaacactctttcagcagctccggatatttattctcaatattatccagcaatgttttggtttcctggatgccaagcagctcctgaatattttgtgtcattatccggctgaattcattgaaaaataccataacaccggattctgttctcatgccggctgcccggcatatctcatcgtgttttttatccgtccagacggttttctccccgccttccggctcaatcacgaatggttcaatatccagtgactcaaaggcatcatttatttctgtcactttgtatttatccggatagctgtaaatcacaccggactgaatctcattaattaagatcaccgatttattttccggtatctcacggctgtaattgataatgatgccgggtaaaaagaaaccgaaacggaaggcaaattcctcctgcaaccatgccgtcatcttctgtttttcaaacatagcctgataacaggtgtggagggtgataatcagcggaatcgcttcattattttccgccgtcagtccgcgcggcgcaaaatcccccgcagacgacgcagataccgccggagaacggctgtcagagcggctttttgccggatcagatgcctgcttctgcttattttgtctgaggcgcattccgtaaaacaacagcagcccggcagccagcagaccgaaaacaccagccggaaaccccggcagcattcccatacacagcgccagaacagcggtcactatcagggtaaaatcatgggaaaacagctccctgacaatattggcccctaaattctgattggtgccgctgacccgggtgacaataaacccggcgctgatggcaatcagcaacgccgggatctgtgccaccaggccatccccgatcgtcagcagtgtgtaagtactcagcgcttcactgaacggcatcgacatctgcgcaacaccgataccaattccgccggcaaaattcacaaaaatgatgacaattccggcgattgcatcccctttgataaacttcatcgcgccgtcaaacgcaccgtacatctgactctcctgctccagctctttccggcgtttgcgcacctcttcattatcaatcaggccggatttcagatctgcatcaatactcatctgcttgccgggcataccgtcgagagagaaacgtgccgccacttccgccacacgctccgaccctttggtgatgacaataaactgcaccacggtgacaatggcaaaaatcacaaatccgaccacaatattttcgccgataacaaattcaccgaatgactgaatgatattcccggcatccgcatccagcaggatcagacggctggtactgatggacagcgccagccggaacagtgtggtgatcagcaaaagtgccgggaaagaggtaaaccccagaatccgggtgatatagaaagagagcagtaacatcaggatggaaataacgatgttcagcccgatcagaaaatcgaccagcattttcggcagcggaatgatcagcatagcgatcaccatcaccataatcagcagtaccgcgatctccggcctgcttttgatcgcattaataaaagttgtcagcatagcaatccattgccggtgaaagttataagatattaatagttttgctcataagggctttcagaaaagaaaccacctgctctttgcctgtttccggcagaaaaaggacatccggtatctcaccaaaaatcacaatcaggcgctgtaaaataagcggtctgtttttgtcattttctgccgccgccagcaacgattctgtttctgactgaaatgcatccggatcacccaagcctgaaatcagcagttgattcagccgctgctcatccgccagtaccggttccgcgcagttcagagacgtaattttctgatgaaacatatcattcagggaaatcagctgattcagggtatgcagacgggttgtcaattccccgaactcactgtgatggctgcaactgggcagtgctgccgccatatcacacaccagcgagtcacggacataacacagcaggcttctgacccggcttttccggtactgctccagccacactttccacagatacagtatgtcgaatttccagctgatataactgcggtataccattctcagctgcgcgcaatccagtagtgttaccggtacatactggcggattttcagtgcgatattgatccctgcgcgggtttcctgtgcaaattctccgtggagtaactgctcaatttctgcatcaatttcggcggcttcctccgcagaaaacggcagtttgcgcaacagggaacgcagtgccatgacataatcactgggatccggaaataaattgcgcacataatcgagaaactcacgaactgagcgcccggaagcagcaaaccacttaacgacccggtccagttttgtttccgcaccctcagcactgtttttctgctctgatgccggtaactggctgatgtgatcctcttttccgtactgccgccggttaaattgtgacagtgccatggccatatcatccatcacatccatcatctgctcggcatggttttccgtctggttttccgccgggcgctgttctgctgcagcattattctgctgtttctgtggtgccgcaaacggactgaacaccggtgcgccgggtaaaccatttatcatatcaatagtcctgcttcagtttttgaatcatcttaataccttgtttattcttataattaaatggaatatgtccggtaatttctgtatcgctgaaaaaatcctgttgcagaatacggggctgcaacaaaaaaagccggaccattttttctgtcttcactgattcaaactgaaacaaccgccctgccagcgggatatcacccagcagcggaattttatcgttatggcgatgggtattttcccgcgtgtagccgccaatcagcagtgtatttccctgtgcgaccctggctattgtgctgatattcttgcggttaatcaccggcagggcatcttcaccgcctgctccgtcagcgtcctttttctgtgcgccgtcttcaagctcaataatcatctccacggatttccgctgattggcgatccgcggtgtcacactcacctttgtgccgtaagtgatgctttccagagatgatgttctctcgccctgtaacttactgtaaaatgtggtgttattatcaaaaatcgccggggtgttatcctgagtcagaataatcggacgggacaccatattggcttgtccctttgcggacaatgctctgatcttgctgaaaaaagaaaaaccggtgaactgattaagctcactgaaattaaaagccactttcatttttcctgtaccgtaatctgcctgccagttgatccccagctggtcagcttcattttttgatacatcaataatccacagtgataactcgatttgcggtttggcagtatccagttgtctgatcagctgattgattaagtgcagtgcattacggttcccttttaacagcaggctgttttccccctgcagcggcacaatccgcacccgctcaccgcccagccagacagtttcagccggctgaatatcgtcctgtccagcatcctgcggtaccagtccggtttttgccgcaggtccggaatccagtaactcccgcaatgcggacgccactcccgggagtatcaggcttttcccccgtgaggtaatttcccggtcctgcacaaaactatgttccagcttaaccagctgaatatgctcatcttccggcgtaattccctgctcctgtacactgtactgtgcctccagtgcgtccgccgcagaacggatcagtgccagatagcgcgggggagccgttacatacaaaatccgctgctgccggtcagatgtcagcgggtattgcgcatcaaacagcccggtttgtttcagaaaagtcgtcagttcattgcgggttaccgcattcagcgtcagcatagaagattcaacttcattgctgctgtaaatatagagtgtgcggttttccaggtatgacaccagcgccatggttttcagcatctgcgacagcgccgcctgcggatcggataaatcaaaagtgccggagatcttcttctttttcaccgcatcagacgaaataattatgacatccagctttcctgccagcgcatcaaaaaaatgatccagccgtgtttctttcgctacatactgcgcctgttgcggcggttttttttcgtataacagtgtttgttccgccatgaccggcaaagaaaacaggcagaaaaaaaggcagaacacccccccggtgctattttttaaccgcatgatttaaattccttattttccggggagacatgccaaataatattttgatttcatttgagaaatgcgatgccgagcagtagccgttatctgccgcgatccgggtcagtgaatgctcttttaccaggatatccagcactgatgccacgccgcgccagtgacgtaactggtatttactctgattgccgatatagcgctggcacaggcgtctgaagtgagtaccggataacccgtaacgctgactgatatccctgatattactgtttttgcaatccgctgcgctgatcaggtgtttcaccagccagtaatgctcagagtggcgcagtgtattaaaaaatgtttttattacactattttcattcagtatttcacagacaatccggtattccggattatctgcatccccctgaaccggaaaaataatctcataatcaggacaaaccttgttatccgcaacttcattattatctgcccgggataaatgataatggcaatctataaatgccagtagttttatacatttcgacagcggaaagcagtagtcagcctgactgttttctccgcatccattcactttgtatatatcattataaatatatatctgactttcctttttcatataaattaaaccatccttgtatcagcatagataataactatctgtaaaacagcaaactgttactgaacgaactaaaatttagtgatgaatttaagacattatactatcttttactaccatttttttataaaactaactaccatttgaataccaagaatacactataaatttaaattattatacttatgatttaatgaccgggatacactgatgcaaaacctttataccctgataacaatttccgataaggaaccaaaggaagaaataaccattccctccggaagatactgcatcaacagtacaattaaccatgacgacgacctgattaacctgaatctcacaggtgcagaaccactgcctgaaaaaacagaagcagagttatatgaaaacaactatcacgtctcttttaaaacctgtgatggtgaattagtaatacaagaaatcaattataacgccccctttatttttcaggggaaagtccttttcgccataaaaaaacaacaggataaatggcgtaaaaacatcatgttatatgaaaaaacgacaaagcgcgctgtcccgcgctatcttctgtctgtaatacttctgttatttatcataccggtaaccggatttatgctctttcagtacgatagcaataaaaatgggaatccggctaatatagatagcaaaaatattataagtcagtacattaaagacaataattacatcattaacggaaataacattcttattttatcctctgatgaaaaattaattaatatcatcagaaataaaatgcctagctataaaattcatataataaataaatcaaaattaaaaataaatgatggtgatatcattctgattaatgttcttcatcataaaaaagagattacatatatacaccatgatgataaaaaaacgctattaaccatcccagatatattcagaaaagacatttccatacaacatttttcactcgatgacataatcaagttaataaataacagattcagccacctgttaatcagatactctgtgaaaaaatcgggtaacaacattatcatttatggcgaaaaaaggagagataaggaaacagataatattataaaggatatcaataccacgatattctcagcaccgggaaacacgctggtaaagtacagggaaataccataccgtgatacaccgccgggagtatatggctcagtaaattatattcacctgtctgatagtcatacacaattcacctctgactaataaataaggatatttatgcctgatatagcaaataaaaatgatgcaataacatttaccaccctgctaaaacaattcaaatcaccgattcatgaagataatgtgaaactgaatacgctgatgaataatttacagtctggcaataaagacacagccaatgcctacgatatggcaatgctgcaggcctgttcctcatcgctgaatataaagtgctcggcactttccgcaatgatccgccagcataaagaaaacctctcaacaccaatcggcaatatgcgctgatttatgacgtaaaaatggcaggttacccgcctgccattaaccataacaaggattgtatgatgtcatcatttaaccggattttacctgtcacaacgatcaccgggatcactgaattactggctgatctcaatgaccgtgagcagtcagctcatcagaatttgatattaccgggaaccgcaaaaaaagacctgcgccggaaaacacaagcactgagcacgggaaaaacagccccggccaccagtgatgtcatgatgatgctggaaaaccaggccgtaatggccaaatggcataccgagatcagtttttattcccgtatgctgcatctgaccctgaatgctgcagataccgtaattaagggtcagtgatgcacaagataatatttatattaataataagcggaataagtctgctgctcggcggctgtaaagaaggtacgattctgtcgtcgctgaatcagcgtcagtcgaatgaagtgctggctgcactgcataaacaccagattcaggcagtaaaagtcccgcagggaaaagggctgtttaccatttcagtaccggaagagcagagccgtcaggccattcatattttgcaggaatatcacctgcccagtaatgagcggattgagattgccgggatctttccgtcagattcactgattgcctctccgcagtcagaaaaagcccgcctgatttcggccattgaacaacggctggagcaatcgctgctctcatttgatgcggttaccggagcccgtgttcacctcagttatccgctgtccggcccgggaaactcccggaaaaaaccggaaacaccccgcgcctctgtgctgatctaccattccggtattgaagatgaaacacaattcacccgggatattcagacatttgtgatgaatgcctttaacgggctgaccgaagaaaccgtttctgtccttctgtatcccggaaaaccggttattgatctgccgcctcagccggaagcagccggactgtccccgctttttctgctgtttccggcaggaataatgctggcagcggccggttatttctgccgtgcacaattacgggcatttctgatgcggcggaaggtaaaacagcatgaatgaccggtttgatatacagggcgcggtcacgcgggtgatgtaccagccggcggattatctgcacagcagccgcttattcagcggattgccgccggcagcacaatcggcgtcttaccgcagaatgcagaacgcagctattatggatcactaccggctgccgcgtgagagggattttgatctgttctccccgctggttatcccgctgatgcgccactggcagcagcttccggccgtcagctgttacctggatatgttcatccgccatgcttatggcctgccggataataccgtgccggatttatcacaacaggcatttttatctctgagccccgtactgccactgccggagtggccacaagcagacaaacagccggatattccggcagtcctgcccggccagattgccatgacacagttattatccggtttttctcctgcgctggcagcccgctttcagctgatgacggatgcatccttgtcaccggcagacatccggcttccgcatctgcccgattcacttttacctttggtattacattatgtgccgttcactgcctgattccctgctgtcacatatcagacacggtgtgctgattaaagatcgccatgtctctgccctctgccgcctcagtaacctgacccggcaggcaaaccagcacgctgcccgcctgataaaacaggcggaagatactgcagaacaacatcgcaaaaccggatttgatgccggttttcagcaggggctggcacagacgatgccggaactgatgcgtgtggtgaatgagtataaatctgtcattcaccaaaacctcgccgttgcagtttccggtctggaaaaagagctgactgcattttttgatgatacaaaaatacgttttcagctgattcatcagttgcttgaacagtttgccgcggagagtgaatgtgaattaatcctgccggctgagcttaaaaaagaaatgactgaatatccggatttcactgtaccggtttcttttcatttcagtcgtaacatcatattacgtaccggaaaaaaattactttatctgacaccggaaacgtttgcccgtgaaaaaataacacaaataaatgcccgtgttgttccggatagcccggcggatatctccggtgaatatttataattatacaaaaaaggacaataaatatgagaacagaaatgacagccggaaaggcggatattaaccctgacgaaaataatgaaaaagccaaacgattgcatgactggcttatgactaattataataaaaaggaagatatttatcggggaatggagttagtaggtattgatggctacaataccggaaataatatacaagaaaaaataaagttattaattactgttgaaaataagttaattaaaaatccggaatattctgatacggaaatgtgcaaatcagtaagccaggttggcggcgaagctgtgaactattatgccttttaccaacaataccttcttaagatggtgaatcaaaaacagctgggattagcaccagatgtactttccgctgattttgaccagaataataacaaagatgactggcttactgcgtttagctgataatgcctgtcgtatcagaattgataacaacagaaaaaatatcttgatttaaataaattgtttgccgttcagtaatactgtttctgctctgaactgatttgaacgcatgttcatgcggatgttctgatgcttcagctttaccactgaggaaccattcgaccggtgcatataataattaatataattcaataagatgatgcagactgattttactgacaccgcgttcgtaacggttaaattgctgctgactgatattcagtttttgcgctaatttaaccgtaacaatcccgagttctttacgtcttgattggattctgtggcctaagactgcataaaagtcggaagtttccataatgtctgcctattttctctataagtcgtgaattcaattaagtaaaattacttaaaagatatattttttatatattaaaatttcaaataaaaacaaagtatttctcgcgaaatactaaaagttatgaataatttcgttttaattatgacgtaatatttaaatttagtttaatatcgatgtcatacttcacaaaaatttcattacatctgtcagggataaacagatttatctgaacttcagtaagaatgcttaaccaggtttatctatttaactaattaaaaaattaagcgccacagaaaaacgtgagaatctttattacgatatcaaaatttaaaatcactctgcatatttaagactattccctaaacaaaataagaccagggttaataactaatcacataaagctaagtaattttttttggtaaaattacttagtcattttgtgattaatcgttgccctgtctttttttatgctatccgtagcatcaaccgaaataatgagagaatgtaaatcaggatgtctgattatatactaatccatccgctaactatgattctttgatctaaccacataaaaagcgaaacagatcacatataacaaaatatctttcattgccttacatcaattcagcgatatccatcacaccctaatcgccattatgcctaaaacaccagctatatgacgaaaaaagactcagcgactgaccaatccgccatccgaaggatgaattgattgaaaaaccagtaataaataatggtatttataattacccatttacacattacttagtcactttcgtaattataatcatctaattatttttagatagacatcagttatgctgcccggagaaaaaaccattaaaatctgacattcacagcgagtaagtgtttcatgctacagcatgaatattttattttaatttcaagtttttattctaaacaaaaaaagatatccagcatgatatttcagcctcattgttgcattttgtaacctgcttgttgtatttgtaattttttatttgttaatcttcacatcacttttcgcttaaaccaggataacttaaattggcacccttatacatcaatgtattagataataattgaattaaaacaattagttgaaatgattacaaatctacatgtgacaggtgtcatttatgtttttctataaaccgctttattgattcaatcactgtttaataattaaaaacatttttgtttagctgcttatatatcatcgcaatgaaactatttaggttatgtcactttattgcaggcataaaaaaagcacccgaaggtgctttttttatcgtcagtaacattaacgaccggctttcagcttctgataatagctttcataaagcacgctggcgtcacccacatcatcctgccactgccctttgcggatagtttcctcatccggataaagtgatttgtcattcacaatctcagccgggagcagttttttcgccgccaggttcggggtcggatacccgatagtctgtgcgacctgtgccgcaatttccggacgcagcaggaaatcaatcagcttatgtgcgccttccggatttttggcattagccgggatagccagactgtccatccagaagataccgccttcctcaggccagacaacatcaatattcaggccggactgacgcgccacataagcggagccgttccagatcatcccgacattcacctccccttccataaacgggttggccgggttatcggagttaaacgctaaaatattcggacgcagtttttgcagctctttatacgcctgctcaatttcagccgggtcggtggtatttgctgaataacccagtttgctcagggcaatctggaacacttcgcgggcatcatcggtcatcagcaggctgtttttgtactccggtttccacagatcggcccaggaggtcacagatgacggatctatctcgtcaccgttaatcccgatagcagttgccccccaaatatacgggatcgagtaatcattttcaggatcaaacggtttgtgcagcagattcggatccagattatcaaagtgactcagctttgatttatcgatcttctgcagcatcccctcgtgacgcattttggcgacaaaataggttgaaggcaccaccaggtcataagccccgtctttgtaggtcttcagtttggtgtacatgctttcgttggattcataggtggagtaaatcaccttgattccggtctctttggtaaactgctctaataaccccggcggaacatattccgtccagttatagaaatagagtgttttactgtcatctgctgatgctgaactcaagcccgctgccagaataccggcaccaagcagtaaggaccactttttcatttcagtgtttccctcaacccgggttaatcagtgaatatcacaggcggtaacgccccctttattaattaagcagagcaattataaaagcggaaaagcggggggtaaagcaacgattacgtcataaaacggtaacagaattgaaaattctgcggcaatacgggattattcacaaaataaaccggcggatccgctgaagaccgcgccggtaacagaaaggttactgctgtttgtgtgagcggtcacgcagcacaagctgactgatgatgaccataaacagcgaaagtgccattaaaatcgtggccagcgcattcacttccggtgaaaccccgacttttaccatcgaatagattttcagcggcagaatttcatagctcggcccggtaacaaatgaggaaaccaccacgtcatccatcgacagggtaaagctcagcagccagcccgcaatcaccgccggtaacgccagcggcaaaataatcttgcgcagaatggtaaattccccggcgcccagatcccgtgccgcttccagcattttcacgtcaaaatctttcagccgcgaatagaccgtgaccaccacaaacggcaggcagaaggtaatgtgcgagaacaacaatgaccagaaaccgagcgacaccccgaggatcataaacagtaccaacagggagattgccatcacgatatccggtgacatcatcaccacaaacagcatgccgccgacaaacggttttcctttgaaccggtagcggtacagtgccaccgctgtcagtgaaccgataaccgtggcaaatgtggcagacagaatcgccatcgttagtgaatgacccgccgcctgcaacaggctgtcattattgaccagtgtgctgtaccagtcagtcgtgaacccctgccagttgatcccgaaacgggatgagttaaaggagttcacaatcagaatgacaatcgggatgtataaataagcatagatgatggtcataaaaccaccgcgtaacaggcgtcctatcattccagttcacccttcttatttaacatttttgccgcacggtaatagacatacagcagcagccccatcgctgcggtcaggaaaatgctggttgccgcgccaaacggccagtcacggatgttcaggaactggctttttatcacgttcccaatcagcaggtttttcgccccgcccatcagatccgccacatagaacagccccatcgccggtaacagtaccagcagacaaccggcgataatacccggcatggtcagcggcagaataatgcggaagaaggtctgacatttatttgcccccagatcccgcgccgcttccagataagatttgtcgagcttttcaatactggagtaaagcggcatcaccataaacggcagcagaatatagataagcccgagcaccaccgcttcagaggtatacatcagcttaaagggtttatcgataagtccggtccataataaaaactcattcatatagccgcgcgtgctgaggaatattttcagcccgtaaatgcggataagcgagtttgtccagaacggaactatcagcaggaataacatcagtggccggtacttctgcggcatccttgcaataaacgccgcaaaaggatagccgatcagcaggcagcagaccgtggcaatcaccgccatattgaacgagtgcagcattacctgtgcgtacatcgggtcaaacaagcggcggtaattgtcgagggtaaagaccatatcgaccagattcgcgtcattgcgtgtcaggaaactggtgccgatgatcatcagattgggcaggaaaataaacagcagtaaccaggcgacaatccccgtgatcacgatagtctggaatggtttacgcgtcattttcatcgcccagcaccacctcccagctttcgacccacgtcaccgcaatcttctgattcagtgagtgatccacatccggatcatcctcattaaagaactcactgaccatcacccgtttgccgttttccatctccacttcggagtccagcgtcattcctttatagttgcgctcgcggacatagccgataagcccggcaatcggctcattatcatggatctcttcaacgcgcagatcctccggacgcagcagcacatgcacccgctgccccggtgtgacatccagggtggtgtaaatatcacactcgtgcccctcgacatttgcgcggatccgctgttcatcgatccggtgcagaacatccgcatcaaagatatttatctcgccgataaactgcgccacaaacaggtttttcggctcttcgtagatttcacgcggtgtgccgtcctgctcgatcctgccgtcacgcatcacaatgatacggtcagacatggtcagcgcctcttcctggtcatgggtgacaaacacaaacgtgatccccagctgacgctgaagggctttcagttcactctgcatctgtttgcgcagtttgtaatccagcgcggagagggattcatccagcagcagcacttccggtttattcaccaccgcacgggcaatggcaacacgctgctgttgtccgccggaaaggtgacccggtttgcgcccggcgaaatcttccagctgcaccattttcagggcttcttccacgcgctgtgtgatttcattttccggggttttctgcatgcgcagcccgaacgcgacgttttcaaagaccgtcatgtgcggaaacagggcataactctggaaaacagtgttgatatggcgctgttcagcggggatatgggtaatatcctggtcgccgagcataatagtgccttcatccgcatcctcaagcccggcgattaaccgtaaaaccgtggttttaccgcacccggacggacccagaatggtgacgaactcaccatgattaattgtgaggtcgaaatgcttaattatgttcttgtcatcaaagcttttgctcagccctttcagggtgacaagtggtgtcagagaggttgtctcagtcatttatgctattcactctatcccggaggtcatgcagatagaaccgtaactgaaaaaagactgttaaagcagattggtctacttatggccaatgcccaaaaccagttacgccgtcaaaaaaagaagagggcataataaacacagcgaccttaaaatgaaagctgaaacgtcatcacgccactaattttttgttcatctttattcatacatatcttaacaatcatccccctgattgaatgcattttcaaacaggaatgcgatcttattgtccgtgcgcaatatctgccgttttggcgctgtaaactattaaaataaacccatcgttagataaaacctatcacatcgatagcagcaagccattggcttccccgcgtagcttcccgtattgttattttcaacgaaacaggaggaatcatctatgtctttaattaataccccaatcaaacctttcaaaaacatggcattcaaaaacggtgaattcatcgaagtcaccgaaaaagacaccgaaggcaaatggagcattttcttcttttatcctgctgacttcacctttgtctgcccgactgagttaggcgacctggctgaccattacgacgaattccagaaaatgggcgtggacatctactctgtctccactgacacccatttcacccacaaagcatggcacagcagctcagaaaccatcggcaaaatcaaatatgccatgatcggtgacccgaccggcgcactgacccgtaacttcgaaaatatgcgtgaactggaaggtctggctgaccgcggtacgttcgttgttgacccgcagggtatcatccaggcgattgaaatcaccgctgaaggtatcggccgtgacgcatctgacctgctgcgtaaagtaaaagcggctcagtatgttgccagccatccgggtgaagtctgccctgcaaaatggaaagaaggtgaagcgactctgtctccgtcactggacctggtcggtaaaatttaagaccccctctccgtcttctttcttatttactgttatcgggtgcattgcacccgattttttaagggaataatcatgctcgataacacaatgaaagcgcagcttaaagcgtatctcgaaaaattaacccgtccggttgagctggtatcaacccttgacgacagtgctaagtccggtgaaatcaggacattattacaggaaatcgctgagttatcgccgaaggttaccgttcgcgaagataacagtgcttctgcacgtaagccgtcattcctgattgtaaatccgggacagactcagggtatccgctttgcgggctccccgctgggtcatgaattcacctcactggtgttagcactgttacaagtcggcggtcatccgtcgaaagaagcacaggaattactggatcaggtgcgtaatctggaaggtgaattccattttgagacctactattcactgtcatgccataactgcccggatgtggtgcaggcactgaatctgatggcggtgcttaatccggatatcacacacacggccattgacggcggtctgtttcagaatgagatctccgaacgcaatatcatgggcgtgccggcggttttcctgaatggcagcgagttcggtcagggccgtatgacactggcggaaatcgtcaataaagtcgacagcaatgccggtaaacgtgcagccgatgcgctgaatcagcaggcgccgtatgaagtgctgattgtcggcagcggccctgccggggcatccgctgccgtgtatgccgcccgtaaagggatccgtaccggacttatcggtgagcgtttcggcggccaggtgctggataccgtggatattgaaaactatatctccgtgccgaaaaccgaaggcgcaaaactggcggcggcactgaaagtgcatgtggaagattacactgcagatgtgattgataaccagagcatcaccgcactgatcccggccacagaacaaggcggcctgcatcagttacagaccgcgtccggtgcgactctgaaagcgcgcagcgtcattatcagtaccggtgcccgctggcgtaacatgggcgttccgggcgaacaggaataccgcaccaaaggggtaacttactgcccgcactgtgacggcccgctgttcaaagggaaatctgtggcggtgatcggcggcggtaactccggcgcggaagcggctatcgacctggccggtgtggtggaacacgtcaccctgctggaatttgccccggaactgaaagccgatgcggtgttacagcagaaattacgcagcctggcaaacgtggatatcattgtgaatgcacaaaccaccgaagtgctcggcgacggcagcaaagtgaccggtttacagtacaaagatcgcgtatccggtgagcttcacacactgacactggtcgggattttcgttcagattggcctgctgccgaatacgcagtggctgaaaggaacactggatctgaacccgatgggtgagattgtggtcgatgcccgtaacgaaaccagcattaaaggggtgttcggtgccggtgactgtaccaccgtgccgtacaaacaaattattatcgcggcaggcgaaggggccaaagcatcactcagtgcctttgattacctgatccgcaccagtaccagaaccgctgaatagtccgctgttcagttgttgtacccaaaggcatccgggggcggatgcctttttttattctccggtaaacgccgccacactctgccggatttgttcccgcagccagcgggttttctgattatgcgcgttgcgtttatgccagagcatcagaaacggaatatccagctgccggtaaaatgattcctcaaacggcagcgggcggcactccagatccagctgaaatttcgtcacatagtggcggcagtagcccggtgcacaggtgatcagttcatgtcccggatgcgcggccatctgcaatgattgttcaaaagaagaataagagagccggatctgccgcgaataaccgagatcatgcagcaaatcatccagcgcccacgggatccggttagcatattccgtactgatatgcgggtatttgatcagattactgattgtccacgcctcactgagcagcggatgtccgcgccggataaacgccagcggcctgtctgtgaacagcagatcaaaattgacaatatccgggatcgcgctgatgctctcccgcgacttcgggtagctttcacgcccgagcagcccgatatccgcctctcccgcaatcacctcactgagtgagttataatcccagtcacggatactgaccgccgactccggatagtgattcaggatcgtgaccgccagatcatgcagcatgatcaggttcagcggttcttccatcagcagacggaactgaacccctttcgggttatcgctgtcgcggatctccgccactgatttggcagtatgcagaaattccggcagcacgccttcgagacgcagcatcagcggtgtcggtattaacccctgcggactgcggataaacagcggatcatcaaaccaggtacgcagtttggtcagcgctttactgaccgccgaaggggtcactgccagccgggccgcaaccaggctcacgctccgctcttccagcagatactggaggatgataagcagatttaaatcgaggcggtgcagtgatttattcataaagcgcccggcggtttccgctgctgacaggatatcgtctcagtaatatcgcacccgccaacgcggttgtcagcagaataatcagcagcattgccaccgcgccggtttccgcggcggccatcagccggatatagagtgaggcaaaactcagttgggcaatggccagcacagaactggccacaccggcacgttttgcaaacggcgacagcgcctgactcatgataatcccgaacatcagtgaaaagccggcaccgcacaagccaaacacaataatcagtatcagcgtgtattccgcaccggacaaaaatattcccagcagcgcggcattgagcaggaacaagcccagcgcggtatataaaatggcatcactgctgaaggcagcgataattttcggcatggaaaaagagacactcatgctgaccatggcaagcaacgccatcgccgctgaaaactgaccggatgtaaattgcatttgtcccatcagaataatcggcgatacattcacataagtcaggatcacgcccattcccaggcaggaaatcaccagtcgtgtcaggaaaaaagcattcagaaaaccttccggctgttcgtctccggctgctgccgctgtttccgccgtgtgtttatccggccgggtctctttaataaagaacagacagaaaataatgctcaccaatgcatagcccgcagaaaagtaaaacatcacagaccagtgaaaatacagcaggataagaaaaccaattaccggcgccagcaccggcgcaatacaggtaattccgttcatcatagagaggatttttgtccgtgccgggccgggaaggacatcacgcagcagggcaaacgtcaccacatagcagaacccggcaccggcgccctgggcaaaacgggcgccgaggaaaaacccggtggtgacagcggacccggcagccaccgaagccagacaaaaaataacggcaccagccagtgccacaggtctgcgcccgatatggtcagcacaccatccggcaatcagcatcatggccgccattccggcaagatatatggagaatgctgtatgcagcgagctttccggggcattcagatccacggcaatctgcggaataccggtcagatgcaaatccacccctagcgggtacatcagcacaatccagaagctgaaaatcacatatttaagcatcacactatccccgtcagaaagtcatctgcgggattgtaactatctgtttttccttaccctactgatgattggtaaaaggacgttttccgttttggaaaagactgtttcctgtcacgacataacagagcacagcgggaacatatttttatttactctgcagggaaataccggttatatatatactatgatgcttattatcactcttataacgtgtatgtaatcatatcctctgcaccaggaattgcttatattgcgttacgacaaatttaataataaaaaacataaccattggtatatttattgccaaaatacccaataaaaacacgataatattatgtttatttcgtcacactctattcatatacaaacaccgcagacatactttaatgtatagctctctctgtttttaaaatcagatacaatatatacccgccagaggagttatcatgcgttttaaaacattaattctgatttcgggattactgaccacattgtccggctgtaccaccccatcacggcaaatggcctctcagcccgcgcaacctgcggccgtgccggtaaaactgctccctgctccggcacagaattccaccagcgacagctgtattgatgatatgtatctgctgcgtaaaacgaatgccaatgattaccgtgtattatccggaaaatacagtgaagtgatgaatgagtttaatttcctgcgggaaaatgaaagcatcatggacaatgatattaaaatttatatgaaaaacagcctgacgataaaactcgggaaggtatgcagtgatatcaaactgagcgcattccgctcaatcaagaaaaaatccagtctgaatgccggttcataaataaaaaaggcttgcagttaatacaagcctttttagtctctgtttattatcagtcagggttctgttcaataatatccaggcaatactcagaaaacagattaagaaatgcaaaatagtttttttcattataatactgaagcgccaaaaaacgttttgcatctgaatcgccttttccggccgcaataagcaaataatactttcccttttcaatatctttgttcacaccgtaacgtccggtgagatacaacgttcccagtaaaaactgagcatttgtctctccctgccctgcttttatactcagcagctcaacattttgcggcggcgtccccgcagaacaaagtaacgggataaaaagcagcgctatcaaaatccgggaatatattttcatttttcctttatccgttaacagtgtgccggggtaaagattatttttgatttattgtcttttctttaccggcaacaacgatatcagggtttactttattactcttatagggttcggactggccggtaaaacgcccgcctgtaataatagaaaatgcttcagcgcggcacacaccattaagttcgcccttttgtaaaatttccgtatttttagcacagcaggtgcccatcataagaccattgattgaaacatgctccgcagtcacatcaccttcaataacgcctttttccataacggaaactttaaaagccccggcattgatattccctttcactttcccgtatatttcaatatttcccccgggagtcatatcgccggttatttcacagccggttcccacaatagtaatacttttaccggctggttcattttttaccggttctgcttttaccggttccgctttcatgggttctgctttatcttttttatcgtcttgtctgaataatgccataaaaaaacgccttcctgttgtgatgaaaaataatacaaagagaagcaaaaaatagatgctcatatgaaaatacaattttctcccggaagagataatcgctatcagtactcctccccagagaaaccagagactgtataaatacaaatgtattttcattcgttcagcgtctttatgcttactggtataccggcacatcactgatacaatttatattgatctggatatgcacaccattctcttcatcgatataaaacacgatgttatcaccgtcatagtgatatttaatatcacaatcctgtttaacaaattttttcattatatttgccaaatcagttttcatatcatcaaaaatcatagttcctcctgatgttcaggtttaaagtgacaacaaatacatctgaacagaactgcataagataaacctatggtttctcatcatagataaccatataactgctggtatttaataagttatttttttgattatttttcagatctttttccaggtcaccgccgaatccggtttgtacatcgtacccgttgttatcgaagaatgcctgccaggcaccggcgatctcatccgagtaaaactgatcaccggattcatcgcgctgcaccggaaccgccggtaatgtactgaacacatcactgtgcgggatccggctgccgggcggcacttttccggcaggctccggcagtgtggtcagatccatcggaaacggcatgccccgtctgccggataaaaagcggtttctgagatcatccggagacacggcgacaactgcccctataccctctattgtttccgatattaccggctcagattgtctgaccaccggttttgatgcagaggatactgcaactgaaaccggaaaaataaacggtaaggaaaacagcagatataatcttatttttttcatattaaattttttatatgacataaacataaatatgtcccggtcccggattttcagagttaatgatgataaaataatttatcaataagtaccgacgatatccccatcataatggttttatgcattatttctgtataaatatactttattattgtttaaatcattttccgtaatcattatagtacgattgttctattcttccttcatgctctccgaccttatgatggtaatagcttcctaataccgagaataaattattaacatcgtttggtgtcatttgaagagcagcaaaatagcgcataagcatatccaggttaaaacaattcacgcctctttcataacgggagatctgttgctgactgatacttaagatttttgaaagttcaataccggataacccgagctgtcggcgtttatttttaagagcctggcctattacgctggaaataggatgaatatttttaatcacaaatcctcctgacgactacattacactctgactactatttattataaataaaacaatatgcattctgttttatatgccatgtgaaataatgataatcactgaaaagataaactaatatactgcatgcctgtttaagacacctccttcttcagttaaaaaagataagcatgataatacattttcactccacgtgagagtaaaaatgctattttcagcattcattttgttaagtagttaactattttattgataacaatatcagagcggcagagattaatgctctctgctatcctgtgtacggataaacattatcgtcactgatatgtcagctgtatttctttttcttatcgccgggaaaattggtattacaagacgatcgcgaagatcattttgtcgccatttacctgttatcgttaataaccttctttatataagttattttattttcatgtaaagagtaaatgacttatggcggtgtgtgcaaatttttattcacctctccattcaaatcgaacaatagattaaacctatcaataaaaatttattcatacccaaaaaatagcataataagtcaaatttactaattacatcagtaagttaaattgaagtgactgtttttacacaataaatacgatttatcctaaatattccccccactcttctcgcgattacgtttgaagcactctgttacaaaataagcattttttattaccttttcaccaaaacagaataccaattaataacatatttttaaaattttattccttaaaataatactaaatcagacgacaaaaccagacgattattcaaatatattaatcatatccaacattattaaccataatcatagtgttattgcaaaataaagaagccacagacatttctgtctgtggcttttattattgttactgattaatagtaacctttcttattaagttggttctgttgatgacaccgttccttttggtaccacctctacctcattattagcatccaccacaatatcaaatacaatccattgcgcttttgtaggtacactcgcgtccggagcatcaaagctcatcattctcgacgtacccggcttcagagttaaatccttattcaggaaaatttgtaccttggctgttgataacttgctatccggaccggagaagtttttaacgaaatacgtataagtcccctgatgcggtgatgtcatcgtaatggtttcgatacccggagcagagcggtcatccttatccagtgatgcatccgaacctgccggagatttagtgctgtagtacacatggtaccgtgcaccaccgccgacacgcggaaccattaagtgcgaatccagatctcccggagcttcactccactgcagaataatacggccgaactgtgttcccagcgccggagacaatgcaaacttaaagtttgtatccgcgccgctcttcacgaccataaagtcatcgtagtcgtcataattattcgctgtgatcttaactgcgtatttgccgccaaccagatcaaccttaaacttaccggttgtattcgttgtagtttcgtacagcaattcagatccatcttccgagaaaatcttaacgtgtgcgccgttaaccggcttatctccggctgcaaccgcatcaatgaccagcactgacgttgagaacagctcttcaaaggagactttcttatccgcattaaccgcagcctgacttccctgtgcggcactgaccacaatgtcatagaccggtgttgtggtactggtcagtttaaccgtggctttcccttctgcatctgtctgctgagaagttgcggagaatgttgcagcggcaccggcggtacctgaccagttcacggtgatgtcacggacagggttaccgttcgcatcattgacttcagcaatgaattcaaaagaatccgtaccgttcgcaattttccgtgtctgtacgccgttaagcttcacattcgtgataatggctgttgcactgtccgcggtgaaattcaccagcttatctgcatcaaccgcatcaccagtaataccttttgcattgaccatgatgtcatacgatgcagtcttcgtactcttcagggtaatttttgtctgccctgccgcatccgtattttcggtggtgcccagcgtgacattatccgccacagtcaatactgttacagcactaccggcaaccgggttaccgttggtatctgccaccgttacagtgtaagtaaaggtgttggttccgttggcaattttgctggttaccgcatcatccagtttcacactgatcacttttgctgctgctgcatccgccgtaaagctgaccgtcttattggctgccacttcagcagtcgaagcatactgagccttcacagtgatatctttaaccgctttggtcgtcgatttcagcgtgataactgcccggccctctgcatccgttttacttgttgtcgctgacagaacaacgtctgtacctttatcctgcgtccatttcacatccagattcgcctggcggatcgggttgccgttgctgtccgttaactgcgcggtataggtaaagttgttggtgccgtttgccactttctcaaccagatcaccatccagggtcactgtgctgacatgcgctgacgtcaggtcatggataaagctgaccgtcttatcggctgccacaaccggcgtactttcatactgtgcactcaccgtaatggtatcgaccgctgttgtggtggaaaccagggtgatggttgcccggccatcagcatccgttttactggtcgctgctgacaacgcgacatcgttacctttgtcctgcgtccatttcaccaccagatccgctttgcgtaccgggttgttgttagcatccaccacctgagcggtgtaggtgaagttgttcgcaccatcggccaccttctgtaccacatcaccagtcagtttcacggtaccgattttggctgacgccaggtcatagataaagctgaccgtcttgtctgccgcaacttcggtggtatccagatactgagctttcacggtgatggtatccaccgcttttttggttgacttcagggtgacagtcgcctgaccgtcagcatccgttttagtggttgccgctgacagtgtgacatcactgcctttgtcctgcgtccatttcacatccagatttgcctgacggacagggttaccgttaccgtccaccagttgtgcagtgtaggtaaaggtattcacgccatcggcaattttctcaatcacaccatctttcagcgtcacagtactgacgtgtgcggatgtcaggttatagataaagctgacggttttattcgctgccactttcgcggtgctttcatactgcgcactcacggtaatggtatcgaccgcttttgtggtggaagtcagagtaatcgtcgctttaccggtggcatccgttttgctggttacatccgacagcgtcacatccgtacctttatcctgcgtccatttcacatccaggtctgctttacggatcgggttgttattcacatccaccagttgtgcggtgtaagtgaagtaactcacgccatccgcgactttttctgtcactgtaccgcccagcgcgaccgtactgacatgcgctgacgccaggtcatagataaagctgaccgtcttatcggctgccacaaccggcgtgctttcgtactgcgcactcacggtgatggtatcaacggcttttttggtggaggtcagggtgataacagccttaccgtccgcatccgttttactggttgtggccgacagcgcaacatcattgcccttatcctgcgtccatttcaccaccagatcagcctgacggatcgggttaccattgttatcaactaactgcgccgtgaaggtatagttatttgccccatcagcaattttctgcaccacatcaccggtcagtttcaccgtaccgactttggctgacgccatgttatagataaagctgacagtcttattcgccgcaacttcggtggtttccttgtactgcgctttcaccgtgatggtatccaccgctttggtggttgatttcagggtgaccgtcgcctgaccgttgacatccgttttagtggttgccgctgacagcgtgacatcactgcctttgtcctgcgtccatttcacatccagatttgcctgacggacagggttaccattgccatccaccagttgtgcagtgtaggtaaaggtattcacaccatcggcaattttctctgttacatcatctttcagcgtcacagtactgacgtgtgcggatgtcaggttatagataaagctgaccgtcttatccgccgccactttcgcggtgctttcatactgcgcactcacggtgatggtatcaacggctttggtggtcgaggtcagcgtgatggttgctttaccgtccgcattggttttactggtctcagcagacaacacgacatcattgcccttatcctgtgtccatttcaccaccagatccgcctgacggatcgggttaccgttggtatcgaccagttgcgcggtataggtgaagttattcacaccatccgccactttctgtaccacatcgccgtccagcttcacggtaccgactttggctgaactcagctcatagataaagctgaccagcttattggcatccactttggctgtaccggcatactgtgcactgacgagtacatcatccactgcttttttggtggaggtcagggtgatagtggctttaccggtggcatccgttttactggttgtcgccgacagcgccacatcattacctttgtcctgcgtccagttcaccaccagatccgcctgacgaaccgggttaccattgccgtcaaccagctgtgcggtataagtgaaggcattcacaccatccgccactttctgtaccacatcgccttccagggtcacggtgcccactttggctgacgtcagttcaaagataaagctgacggccttattcgctgccactttcgcggtatcttcgtactgtgcactcactgtaacgttatcaacggcagttgtggtcgatgtcagtgtgacagtggctttaccggtggcatccgttttactgcttgtcgctgacagcacgactgcattgcctttgtcctgcgtccagttcaccaccagatctgcctgacggatcgggttaccgttaccgtccaccagctgtgcggtgtaggtgaacgcattgacgccatctgccactttctgcaccacatcgccgtccagggtcacggtaccgactttggctgaagtcagttcataggtaaagctgacatttctgtccgccgccacagcagctgtactttcgtactgcccgctgacggtgacattatccaccgcagtggttgtcgatttcagcgtgatagtggctgtaccatcagcacgggttttactggttgtggccgacagagcaacatcgttacctttgttctgcgtccagttcaccaccagatccgctttacggaccgggttaccattaccgtccacaacctgtgcggtataggtaaagaagctggtgccatccgcgattttctgcgtgacagtgccgtccagtttcacggtaccgactttggctgaactcagttcatagataaagctgaccgtcttatccgcagcaacctcagccgtttctttgtactgtgctttaaccgtgacgttatcgacggcttttgtggtggatttcagggtgatggtcgctttaccatcggcattggtctgactggttgccgaagacagcacgacatcattacctttgtcctgcgtccatttcacatccagaccggcctgacggaccgggttaccattgccgtccaccagttgcgcggtgtaagtgaaggtattcacaccatccgccactttttcaataacagcgtcgtcaagggtcaccgtgctgactttggccagattaacgttatagataaagctgaccgttttatccgctgccgctttggcggtactttcgtactgcccgctgacacggacatcatccaccgcttttgtagtcgacgtcagtgtgactgtggcctgaccatccgtgttggttttactgctgacagcagacaacgtcacatcattgcctttatcctgcgtccacttaatatccagaccggcctgacggatcgggttaccgttgccgtccaccagttgtgcggtgtaggtaaaggcgttcacaccgtcagcaactttttccgtcacatcaccgttgagggtaactgtaccgactttggcggaggtcagttcaaagataaagctgatcagcttattcgcatccactttggcggtacttgcgtactgcgcactgacgcggacatcatccacggcttttttggtggaagtcagagtgatggttgctttaccggtggcatccgttttactggttgtggccgacagagtaacatccgtccctttatcctggctccagttcaccaccagatcggcctgacgaaccgggttcccgttgccgtccaccagttgcgcggtataggtaaagaagctgacaccatccgccactttctgtaccacatcgccttccagagtcacggaaccgactttggctgaggcaatgttatagataaagctgacggttttatccgccggcacgactgccgtttcctggtactgcgcgctgacacggacatcgtccaccgccgtggtggtcgaaatcagcgtgatagtcgctttaccatcggcatcagttttactgacaacggaggacagttttaccgccgcacctttatcctgggtccatttcacatccaggtttgctttgcggacagggttaccgttgctgtccaccaactgtgcggtataggtaaagctgctggtgccgtctgccactttctccgtgacagcgccattcagctccacagtgccgactttggccatattaatgttgaagataaagctgacagttttgtttgccggtaccacagccgtttctgcgtactgtgcactgacacggatattctccgctgcttttttggtcgacgtcagagtaatcacggctttaccgtccgcatccgttttactggttgcggctgacagcaccacatcactgcctttgtcctgcgtccatttcacatccagatccgcctgacggatcgggttgttgttctcatccaccagttgtgccgtgtaggtaaagctgctgaggccatcggcgactttttcagtcacactgccgttcagttccaccttgctgactctggctgaggcaacgttataaataaagctgacggctttatccgcctgaataaccggcgtaccggcatactgcgcactgacacggatgttatccgccactttggtggtggagatcagagtgatagtcgccacaccgtctgcgttggttttgctggtttccgccgacagcaccacatcgctgcctttgttctgcgtccacttcacatccagatctgcctgacggatcgggttaccattaccatccaccaactgcgcggtataggtaaagctgctgagaccatcagccactttctgagtgacatcgccgttcagcgtgactttactgaccttcgcggtgtcgatgttatagataaagttaacactcttatccgcatccacacttaccccgccgtccagcgccgcgctgacaagaacattgtccatcgctttattggtaccggctaaggtaatggtgattttaccttccgcattggtagtgcctgttaccagtacaactgctgccggattatctgcggatgcagtaaccgggacaccctggatcgggttaccattattatcctgaaccaggacggtataggtgaagttatctgtaccgttggcaactttggttgtctgatcaccgtttaacagcacactgcggacagccatcgagctgttatcaggtgtgatacggacaacggtggttttaccggctgcgtctgtggcgttgatcgcacggacagtcgcatcacccacacgggtaccggtcagtgtaaaggttgcctcaccgttgctgccggtaacgacattctgatcactaagctggccgagtgtggttgtcaggttaacggtattacccgggatcacgttattaaaggcatctttcaccgtcacggtcagcatcgcctgctcagtaccgtcagcaataatggctttcttgtcactgatcagggacgtgatggttgcggtggacagatccggaacaaaggtcagaaccgcagtttcacggctgtcattgatactgaaggtatagttatcctgacccgctttggtattggtgatattcacccgcaactgaccattactgtctgtcagaccaccggcaggctgagtcagataaccggcagttcccggtactttgattgtcaccggtgcaccggcgatcgggttgttgcggttatcagtgacggttaccagaacactgttcttcgctttaccatccgccgccgaattatcctgagttaccacaacactctgaatcttcgcggtactgatatccgcgataaactgtgctgtcacactcttcgacgtgcccgttccctcaaccaccagtttggaatccccggccgtttcactgctgaaccggatagtgacctggccgttgctgtcagtctgctggttcggatccgcgactgtcgcaccgttatccgctctggacgttaacgggaagttttccaccaggttatcgaactggtcagtcaccgttgccacagcgatgtttttcgcctggccgtcagccactgctttgttattggttaattcaagggttttaatttttgctgtattgatatcagcaatataggtgattgcttcggtacggctgttaccgttacgcattttggctttcagcaatcctttaccggcggatttactgataattttcacggttgccgtgccgtccggcccggagatcacggtcagtgtctggccgctgttgccgtccgcatcataaatggtcacgccttccggatttttcagaccggaaacgctgaaagtcactgctttattcggcagcacttcgcccttgtcattctgtaacagcgccacagcggtaaactggtcactgttgttggcgattaaggattggttcggcgtgacggtcagtttggtgatggtttccactgacggaataacattcacccacatttctgcggtgttggacgggttaccctcgttatcttcaccgacagcggtcacacggtagccctgcggcccgccgttacgatccataaaaatatattccggcagcgtaatatctgccgtggtcagcccggtctgtttgatttcaccgccgtttgccagcagttcaggcgctgaccagcgcagagatttcagaccgtatttggctttcagcacactgaccgtcaccggcagtgtctgtgccgcttcaccgttgagtgtcggcggcagggcaatccgcagcagttcctgcttacggtactgcatcacaatgttgtagtttctgtcgacgaagtcgtaacggttacccgccaggttacgcatcagatcaacattgtcggtatccagctgctgtgacagcggcacgccgaaacggtaggaaagttccattccaatctggctgtcgttggaatcaccacgggatgtctgacctttgaacgtgatcagcgggaacggggtgtaactgagcccgatggtggagaccgacgggttacttttcagttcaccggaagaggtggtactggccaggctgacgccgtcaccgaagtactgttcatattttgcaaatgcgcctaactgcggataatcaggcagatagccctccgcacggatatcaaacccgttagccgggcgttcatcgtaatcgcgcatttcgtgcagttttgactggtgccagtctgttaccctgaagtagccgttagccgcaaacttcaggtaattggcccataactcaccgccgacaccgacccgcgagttactgccggtgatatcgtagtcataaaagctgttaaccccccacatccagccgtcttcatactgacgatagcccagaccgaggttggtggtggtacgttcttcattagcgcgaagcccgatctgtgagaagaacaggctgttcggattatcaactaacgggaccagtacatccgcatcaccggttttattgctgccgaactgaatacgggcgtggcccacctggttcagccagtcattcacctgctggttaagcaggttttcaccgataccgcgcacatagccgagagatgcatccaccgcatcctcactggagaggatctgcccggcctgtgaggcgttacccgccagacgggcttcattctgtgccgcttcatcttccggagaaatatccggcagaccgagggtcggcaaggcactgaagatatcatcggtccgcacggtattatcgcgcggtgccgggttcgccgggtcaggcagcgtgctgacactcatcgggaacggcatgccgttctgtccggagataaagccactgtccgaaccagccggcatcacgccgtattcactgccggacggcatctcaacggtaaatccctcaccgctcagagtgctgccggaagcggtttttccgccctgtggtttcggaggcggagccggactcggagatgtatccatcaatgcattaagtccgtcaaatgtttctgacatgattaattcattgtcatgttctgccgcgtaggcaacagataatgttgccgtcgacaccggaaaaaataactgcaaaaagagtaacagataggctgttaccctctttgtttttgagtaatacgaagtcacaggcatgaatacatccccgaaataagattaaaaatccaaaaaaaaattaaatatcagaaagtgcttttattttatccttcacaccaatgaaacctgcgtactgaactttggtacataaggtgtccagttttttattcagtgtcatggataacacttcacgggagtctttatccataatctctttattgacgtttaagaaggtatagttctgattaatacgtccgtagcttgatgagaaatcattaaattcagcctgatttacgcctttaagaaaattaaatccgtccacacaggcgttattggtggatgcaataacaatcccctgagatgccatttgtttacttcccacatacgcctgtgccgcgttattaccggtcacattaggtgtcgcggaacgggtttgctgttttaccggcgggtttttaactgctgccgtgtttttctttaccggtgatgttgagcaggcagaaataaccagtgaaagcccggctacaacgagtgcttttttgttaatcatcattttcattcattcctatttataaaattaactcttacagagagaaattacaggtttaataaaaacacctgcctgctgatgatatgaagttaatgcaacatattattaacagcattcagatgtcatcagacagaaaaaggttggtgatattaaatacacgcgtaaagggagagtcataacagttggatagtcagcattacgggttatcagtgtcatctgtatcttccggtccggaaataacagactgataatgggtgctgataatggagaaaagttcgctgatctcacgctccgtcattcccagcgccgcacaatacctgagcatgacatccggactgagcaccgacagcccgcgttcatagcgggatatctgctgctgactgatattcagtttctcagccacttccgaacctgttaatccctgactttttcgctttctttttaagaaaaaaccaacttctttcaatagagatatattattatcacacatagcaaaacctgatttacccgggatatttaactccttttaggtttatccggaataattaacgatagtaataaacataaaaatcccgttattacacactatatccaccggagaatcagaccggaaaggtaacgatccctgttaattactgcatcctttatcggaaaagaagccagccactgccttttattttcagttgatattattcagccaaatacaaattaagtgagtttaatctcggttattcagcagcaataaaatcactgataacaaaataataccgataaatcatcactatcagatcgggtaaagaataagtgaatccggagcagtcatgcaaataatcattcctctttcgttgccttaagaacaattggtgaaatctatctgtgagtaaccacaaatagtaataacagggaaaatagtcatgtaatttcagttcattatataaaaacaaacaggatgggtaatgatggtgtcagaaaaaggatatttgagataactccctgtatgattaaacctgtatcactttgttacagtttttatcctctttttgttcatctgataataataaaaagaattttattatgatttattaaatataactccaataacttgtattttcgccagtcaaaataaaaacaccggcctgtcggaagaggccggtgtaatactgatgcaatatagcattaagaaaaacgattttcgtccctgtatattgcagggttatccgttatcagcattcccactccccagtccgcataatgcgcgaccagctccggataattcggtgtatagcaaaagatctgataaccggcctttctcagcgatttcgccgtttcttcccgcagaaacagccagtcgcaatgcacactgaacgcgtcaatctcctgaagcagtgccagaggctgcggcggaattttttcccagagctgtccgcgccggatgtgcggcatccgtttgtgcatatggcgcagtgtgcgggtatcaaagccggaaaacagaatccgctctgccgggaaattctgcatttcaagtactgctgcggtggcttcacacaaccgggcaattgcgtggtcgctgtctgtcagctcggttttcagttccaggttcagatgcaatccggattcttccgccagcaccagcaggtcggtcagcagcggaattttttccccccggtatacctcccccgcccataacccggcatccagtgcccgcagttcgcgtaaggtcagatccgtcactttcccgctgccgttggtggtgcggttcacagtttcatcgtggatcagcaccggcacgccgtcagcgctgagctgaacatcggtttcaatccacagacagccaaactccgccgcctgccggaatgccgccatcgtgttttccggtgcacgggcggcaaagccgcggtgtgctgcaataatcataatctgttcctttatacagagaggccggatagataccggtactatttgttctgcaacacccataccgctgcttccacccgtgattttaccttcatttttttcatcaggttttttacatgcacttttaccgtgctttccgtgatatccagtttacgggcgatcattttattcggctgcccctgagcaatcagtttcagtatatcgcgctcacgcggggtaaggctgttgatatccggctcatcatcactgcgcacctcacgcagcgcgcctgccagcacttcggtcagtgccggggagaccaccattttaccggcggccgcctgacgcagtgccaccagcagctcttccggctccatatccttgagcagatagccgtccgccccgcggcgcagtgccgtaatcagatcttcccggtagttggacacactgaacaccaccacccggccggagagcggtttgcgccgcagaatatccagggtttcaaagccgttcatttccggcatattcagatccagcagaatcagatccggatcgagtgattccgccagcgcaatgccgtcgcggccattcccggcttcaccggccacagtcagtgacggctccatgctgattaattgcctgacgccgttacgcagcatcgggtgatcgtctatcagcaggatcgtggagggagaggccgggtcagcggcttcatccggatcactgagtataatctctccggccgaaagtattctgttcgtcattgtttaccttgctcctgaatcgtcttcatttattcttatagttgtattggcgggaaagcttatcagcacctgagtgccgccctgttcccgtgtggttatccggcaggttccgtgcagtgtggctgcccgttcccgcatgatggataacccgtaatggttatttttttccggatgttccgggatcccttccccgttatcttccacgctgatataaatcatctggtcttctgaccggcatattacctgcgccctcgacgcattggcatgctggaggatgttgctcagcgcctcgcggacaatctgcaccacatgaatggtctggtgcgcggagacctggcgcccggagagctgaaaatcaaaaccgatgcggtaacccatccgctgctcaaactcctccagcgtgctctgtagcgcggcaagcagcccgggctcagtcagtttcaggcggaaagtggtcagaagctcacgcagctgatgataagcaccgtttacttcctggcgcatttcggtcagcagtgtctgacaattttccgggatctgcgcggaatgcatctgtagatagcttatctgaattttcagacaggataacgactgcgcgatagaatcgtgaagttcgcgggcaatcactgagcgctcatccatcagaatcagctgttgctgctgctcatgctgataagccagtgcaaaggctgaaataatttgtttgctcagcatctgcatcatattctgctgctcactgttcagctgctgtccggccggtaacagaagcgtcaataccccgtaacggttaatcggcccgctcagattccaggtcagctgttcctgtgtctgtgacggcacgcagccgcagtcaccgatttctgtaaaacgggtggcgttattatcctcaaaaatccgcaggcacagtgcgccttccggcatgatctgatgcagatcacgcagaatatccgtcagctgagtggtcaggtcattggtgttattcagccgctgcccgctcttatataagaaggccagcatctggtttttttcctgtaaatcctgtgttttgaccgccacccgtgattccagctctccgtagagcgcagacagttcctctgccgtacggttgagggtattaccgatcatggtgatttcgtcgcggtggtcataatccgcaaagcgcggctgaaaattcccctgccccatcgcatccgcctgcgccagcagacgctgccacggatggaggatccggcggcggaaatgccgcgccgacaacagcagcagtaaaatcatcagcgcgataaagaccagctgaatggccgccaccagccggatggtggattcagtctggtgatcgatagccgacaccaggctgtcaatctgactgacaaacgcggccaccagcgctcgggcctcttccggctgttttgccgcttccagtgccggacgcagcttttgccgccaggtctgttccacagagagaaactgctgctgtattttggccggactgactgctttcattccggcaagcagggttaaatcggattcgaaatcatcaagatactgctgtgaatgtgcggtcagggggatttcagacaggaaacggtaactctgcatccgcaatgtgccggatttattaatcgcgtgcgcattgccctgcacactttccgtgatctgattggtcagccccatgccaatcaccgcaaagacggtaagcagcaccataaaaccggtgatttgggtaagaatagatgtgtgtttcagcatgcactgatgctcctctgaactgaccggttattctctccgatttctccgaaaaaacacttaccaccaaagtagtaccccttaaaaccttgagggattagctgttataacccacactaatcataatgatactaaccgtttgattttacgtattttcatcagattaacaaccgtacccctaaagtagaatgacggttttgcgcttaaaaatcaatcggttcaccctttgattaagatcagtatcagcaccttataacccacgtaaaacgcctttaatttcagcataattttgaggtgtattatggctcagatctccgaaggcaaggcatcagcgggcgtcattaccgactggcgcccggaagatgaaaaattctggacagagagcgggcaccgggttgcatcacgcaacctgtggatctccgttccctgcctgttactggcattctgtgtgtggatgctgttcagcgccgttgccgtcaatctcccgaaagtcggctttaactttaccaccgatcagctgtttatgctgaccgcgctgccgtctgtttccggggcactcctgcgcgttccttactcctttgttattccgattttcggcggccgccgctggactgcgttcagtaccctgatcctgattgtgccgtgtgtgtggctcggattcgcggtgcagaacccgtcaacgccgtatgcggtgtttgtgattatcgccctgctgtgcggcttcgccggggcaaactttgcctccagtatggggaatatcagcttcttcttcccgaaagcgaaacagggcggagctctgggtatcaacggcgggctgggtaacctcggcgtgagtgtgatgcagctggtcgcaccatttattgtgacattcggtgtgttcagctttatgggcggcaccggcgtgacccagccggacggctctgagctgtggttacagaatgccgcgtggatctgggtgccgttcctgctgctgtttaccaccgccgcctggctggggatgaacgacctctctgccaacaaagcctcgttaaaagagcagttaccggttctgaaacgcaaacatctgtggatcctgagcttcctctatctctccacgttcggctcatttatcgggttttccgccgggtttgccatgctgtcgaaaacccagttcccggatatcgttatcctgaaattcgccttcttcggcccgttactgggtgcgctggcccgtccgctgggcggcttcctctccgataaattcggcggtatccgcgtaacctttattaacttcgtggtgatggcggtatttgccttcctgctgttcttcacactgccgggcaaaaatgatgccggttcatttgccgccttcttcggcgtctttatggtgctgtttttcactgccggtctcggcagcggctctactttccagatgattgcggtggtgttccgcaaaatcaccactgagcgcgtactggcacagggcggtaccgaaaaagaagcccagcatgaagccatcaccgaaagtgctgccgcactcggttttatctctgccatcggcgctatcggcgggttctttatcccgaatgcctttggtatttcactgacactgaccggctcgcctgccggtgcaatgaaagtgttcgttgtcttttatgtggtctgcattctgaccacatggctggtatacggccgtaaaaaataattaattcaattctgataatcagagcaatgtgagcgcccggcgcttatcgggggattaccgaatgagcaagtttttagacagattccgttattttaagcagcgcggggaaaccttctccggcgaccacggacaagagctgaacgtcaaccgcgactgggaagatggttaccgcagccgctggcagcatgacaaaattgtccgttccacccacggcgtgaactgtaccggttcatgcagctggaaaatctatgtgaaaaacgggctggtgacctgggagacgcagcagacggactacccgcgtacccgtcctgatctgccggatcatgagccgcgcggctgtccgcgcggtgccagctattcctggtatctgtacagcgcaaaccgcgtgaagtatccgatggtgcgcaaacgcctgatcaaactgtggcgtgaggccaaagcacagcacgcggatccggtcgatgcgtgggcatccattattaatgatgaggcaaaagccaaaagctacaaacaggcacgcggccgcggcggttttgtccgctccgactggcaggaagtgaatgaaatgattgcggcagccaatattgtgactgccaaacagttcggccctgaccgtattatcggcttctcgccgatcccggcgatgtcgatggtctcctatgcttccggtgcccgttatttatccctgatcggcggtgcctgcctgagtttctatgactggtactgcgacttaccgccggcctccccgcaaacctggggtgagcagactgacgtgccggaatcagcagactggtataactcctcttatctgattgcctggggttccaacgtcccgcagacccgtaccccggatgcgcacttcttcaccgaagttcgttataaaggtaccaaaactgtcgcgatcacgcccgattatgctgaaatcgccaaactgtgtgaccagtggctgaacccgaaacagggtacagacagtgccgttgcactggcgatgggtcatgtgatcctcaatgagttccacgcgaagcgtcaggcggaatacttcaccagttatgtccgcacttacagcgatatgccgatgctggtgatgctggatccgcgtgcggaaggcggctatgtgccgggccgtatgctgcgggcatctgatctggtggattctctcggcgagaaagaaaatgctgagtggaaaactattgccattgatgagaacagtcagcaactggtggcaccacagggctctatcgggttccgctgggacaaatcccgtaaatggaacctggagccgcgtgacggcaagagcggtgatgagatcaccatgcagctgagcctgctggataagcacgatgaagttgctgatgtcgcttttccgtatttcggcggcattgaaaatgagttctttgaaggtgtggcactggatgaagtgctgatgcacaaactgccggtgaaagtggtacgtctggcagacggcagtgaagtccgtgtggcgagtgttttcgatttaaccctcgccaactacggtatcgatcgcggcctggacgatgtgaactgcgcggcggattacagtgaaatcaaggcctataccccagcctgggcagagaaagtgaccggcgtcagccagcatcacatctcccgcattgcccgtgagtttgccgataacgccgagaaaacccacggccgttcaatggtgatcgtcggtgccggtatcaaccactggtatcacatggatatgacctaccgcggcatcatcaatatgctggtgttctgcggctgcgtcggccagagcggcggcggctggtcacactatgtgggtcaggaaaaactgcgtccgcagaccggctggttaccgctggcgttcgggctggactggtcacgcccaccgcgtcatatgaacagcacctctttcttctataaccactcaagccagtggcgttatgaaactgttcagccgcaggagcttctctccccgctggcggataaatcccgcttcagcggcagcctgctggacttcaacatccgcgctgagcgcatgggctggctgccgtccgcaccgcagctgaacgtgaacccgctgactatcgcggcgagagcaaaagaagccggtcaggatccgcaggcttacaccgcagaagcactgaagagcggcactatccgctttgcggcggaacagccggataatccgcagaacttcccgcgtaacctgtttatctggcgctccaacctgctcggttccgccggtaaaggccatgagtatctgctgaaatacctgctcggcaccgaaaacggtctgctgggtaaagatctcggcgaacagggcagcgtgaaaccggaagaagcggaatgggtggataatgccccggaaggaaaagtggatctggtggtgacactcgatttccgcatgtccagcacctgtctgttctccgatatcgtgctgccgaccgccacctggtatgaaaaagatgatatgaacacctcggatatgcatccgttcattcatccgctgaccgctgcggtcgatccggcctgggaatccaaaaccgactgggaaatctacaaagggatcgccaaatccttctctgaactctgcccgggccacctgggtaaagagacggatattgttacgctgccaatccagcatgactccgctgccgaaatggcgcagccgtttgatgtgaaggactggaaaaaaggcgaatgtgacctgatcccggggaaaaccgcaccgcacctgatggtggtggagcgcgattatccgaacacctatgcccgctttacctcgctggggccgctgatggataaactcggcaacggcgggaaaggtatcagctggaatactcaggaagaagtcgatttcctgaaaaaactcaaccgcacccgcactgagggcgcagcggaaggtcgcccggcaattgaaaccgcgattgatgcggcagaagtcgtgctgtcactggcaccggaaaccaacggccatgtggcggtgaaagcctgggatgcgctcggtaaagtgaccggccgcgaccatacgcatcttgccatccataaagaagatgaaaaaatccgcttccgcgacatcgtggcgcagccgcgcaaaatcatctccagcccgacctggtccggcctcgaagatgagcatgtctcttataatgcgggttacaccaacgttcacgagatgatcccgtggcgtaccctgagcggccgtcagcagttgtatcaggatcatgaatggatgcgtgcatttggtgagtctctggtggtgtaccgtccgccggtggatacccgtgcggcacaaccgctgctgggcgcaaaaccgaacggttatccggagaaagccctgaacttcctgaccccgcaccagaaatggggtattcactccacctacagcgacaaccagctgatgctgaccctcggccgtggtggcccggtggtatggctgagtgaggacgatgcccgctcgctgggcattgaggataacgactggatcgaagctttcaacagcaacggcgcactgactgcccgtgcgattgtcagccagcgtatcccggacggcatgatctttatgtatcacgcccaggagcgtcagattaacctgccgggatcggaagtgaccggtatgcgcggcggtattcataactccgtcacccgtgtctgcccgaaaccgactcatatgatcggcggctacagccacctggcatacagctttaactattacggcactgtcggctccaaccgcgacgagtttgtggtagtccgcaaaatgaaaaatgtggactggctcgacggtgagcaggatggttatcaacagaccctgagcgggcaggagaaagcataatgaagatacgttcccaagtcggcatggtattgaacctggataaatgtatcggttgccatacctgctctgtcacctgtaaaaacgtctggaccagccgcgaaggtgtggaatacgcgtggttcaacaacgtcgaaaccaaacccggcctgggctacccgcataactgggaagaccaggaaaaatggaaaggcggctggatcaaaaacatccgcggcaaactggtgccgcgtatgggtaacaaaatcggcctgctgtcaaaaatcttcgccaaccccgaccagccggagctggatgattattatgagccgttcacttacgactatgatcatctgaaaaacgccccggaaggcaatctgccgaccgcccgtccgcgctcactgatcaccggtcagcgcatgacaaaaatcgaaaacggcccgaactgggaagatgacctcggcggtgagttcagccgccgcagcgcggacaaaaacttcgccgacatgcagaaagagatgtacggccagtttgagcagacttttatgatgtatctgccgcgtctgtgtgaacactgtctgaacccggcctgtgtcgcgacctgtccgagcggcgctatctacaaacgtgcggaagacggcatcgtccttatcgatcaggacaaatgccgcggctggcgtatgtgcctgaccggctgtccgtacaaaaaaatctacttcaactggaaaagtggcaaatccgagaaatgtattttctgctatccgcgtatcgaagccggtcagccgaccgtctgttcggaaacctgtgtgggccgtatccgttacctcggtgtgctgctctatgatgcggatcgcattgaagaagcggccagtgcggataacgaaaaagatctgtatgagcgtcagctcgggatcttcctcgacccgaacgaccctgaagtgatccgccaggcgcagaaagacggcattccgctgagtgtgattgacgcggcacagaaatcgccggtctacaaaatggcaatggagtggaaacttgctctgccgctgcacccggaataccgcaccctgcctatggtctggtatgtgccgcctctgtcaccgattcagtctgtcagcgatgcgggtatgctgccgcacagcggcgtactgccggatgtggaaagtctgcgcatcccggttcagtacctcgccaacctgctgaccgccggggataccgcgccggtactgcgtgccctgaaacggatgctggccatgcgtcactacaaacgcgcggaaaccgtggataaaacccgcgatatcagtgcgctggaagaagtgggtctgacagaagcccaggcacaggaaatgtaccgctatctggctatcgccaactatgaggatcgctttgtgatcccgtcatcacaccgcgaactggcccgcgaggcattccctgagcgcaacggctgcggattcagcttcggtgacggctgccacggcagcgataccaaatttaacctgtttaacagccgccgtatcgatgccattgatatcacgcagaaaacaccggcagatgcaccaatctcagagaggcattcatcatgatcagcttaaaaattatcggctgcctgctggattacccgaatgaggagctctggggacaccgcgacgaactgattgcagagattgaacaggcgcacgagctgcgcctgactcaggccgccgcactgatgtacttcgtcgctgaactgaccgctgagccgctgctcgacagccaggcacgctacagtgaattgtttgatcgcggcagagctacctctctgctgctgtttgaacacgtttacggtgagtcacgcgatcgcggccaggcgatggtgtccctgctggagcagtatgagcaggccgggatcaccctcagcagccgcgaactgccggattacctgccggtttatctggaatatctctctgttatgccaccggaacaggcctgtcagggactgaaagacatcgcgccgatcctcgccctgctcggtgagcggctgcgtcagcgtgaaagtcattaccatgaactgttcagcctgctgctggccatggcggacagcgacctgacactcagctcactgacccgtcaggtggacggtgaagcccgtgatgacactccggctgcactggatgcggtctgggaagaagaacaggtgacattcctggccgataaaggctgtgacaattctgttctgacacagcatcagcgtcgtttttcacagagtgtcgccccgaattacattcaggtgggtgacgcgccggttccccctgcggcgaaaggagtaactccatgaatttcctgaatacgtttttctttgatatctatccgtatatcgcgggcgcggtgtttatcatcggcagctggctgcgttatgactacggacaatacacctggcgtgccggttccagtcagatgctggataaaaaagggatgcgtctggcttccaacctgttccacgtcgggatcctcggtatcttcttcgggcatttcgtcggcatgctgacgccgcactggatgtatgagccgtttatcactgtggcgcagaaacagatgctggcgatggtggcgggcggcacctgcggggtgatgacgctgatcggcggcggtctgctgctcaaacgccgtctgaccaacccgcgcgtccgtgcgacatcatctgcgggcgatatcctgatcatcaccctgctggtgatccaggtaattctgggactgggcaccattccgttctccgcacagcacactgacggcagcgagatgatgaaactggtcggctgggcacagtctgtcgtgacatttcaggggggtgcatcagagcatctggaaggggttgcctttatcttccgcatgcacctggtgctgggtatgacactgttcctgatcttcccgttctgccgtctggtgcatatctggagtgcgccggttgaatacattacgcgccgctaccagttagtgcgcaaccgccattaattaacaacaacagtctcatcctttaaatgcacagttttgggtggctccggccacccctttttttatcaccgtgttattctttcaaaaaaagttgaaacagattaccgcttcagaggcaaaacaaccggtttctctgccgccgtaacgtgtcactaacattttcaacatctttctgccgactaaaaaattcttacaaatcaattcggtaaatcacaatcagcagaaacactctgttttatcccggttctgatgttcacttctgctatttttcactgcttttttgttattaaaatgattttgtaatcattaaaaaatagttgaatttaatattgacccacatcacaaaactggtatgatacctccatcgaagcaaaacacgcttactcaactaattcaaagcaggagttcattatgaaaagtatcaaaactttcttctctaatctgacccgtgctgctgctatcattgcaaaatacagcaaagcattctgattaaatcagacagatataagaaaagcgccctcagggcgcttttttattgcctgcgatccggcctgcaacaaaagttgaagcgactgaccggcacaacgacgcactctccgcttttcctgatgcagtaacgtgccgctaacatcttcaacatcttgttactgattaaaaaatcctgctaaatcaattcagtaaatcatagccagcagaaacacactgttttatcccggttatgatattcacttttgctatttttcactgcttttttgttattaaaatgattttgcaatcattaaaaaatagttgaatttaatgttgacccacatcacaaaactggtatgatacccccatcgaagcaaaacacgcttactcaactaattcaaagcaggagttcattatgaaaagtatcaaaactttcttctctaatctgacccgtgctgctgctatcattgcaaaatacagcaaagcattctgattaatcagacagatacaaaaaaagcgcctttaaggcgctttttttatgtccgcagttttttcaccagataatcaataaacaccatcatatgcggcggctgataacgcgacggcggataaagcagccaggcatccccgctgtaacgggttttaaacgtccagtccggcagaacctgcacaatctccccgctctccagcgatttacgcgccgtaaataccggcagcccgccgatcccgagatgtgatttcaccccgccgagccgcaccccgctgtggtttgatgaataacgcccgtgcacattcacagacaccactttattcccctgctgaaaacgccagcgggtatctgccgcttcctcactgaggaacaggcagctgtgatccttcagctcctgcggatgagacggagtgccatattccgccagatactgcggcgtggcacataaaatatgactgaccgtaaacagccgcttgccgataagccccggcggcggttcattggtaatacggatggcaagatcgatttcctcatcaatcagatccatatagcgatcttccagacgcagcatcacattcacaccggaattcgttgcgaggaattcattgataagcggatgcaccataaaatagcccagtgctttcggagcgcccagacgcaccagcccggaaggtgtttcactgaactgcccgctggcactcatcaccgctcccgcagaattcaccagcgcctgacagtgctgatataccgccttgccactctcattcagacgcagcttgcgggtcgtgcgctgcaataaccgggtattgagtgcgcgctccagccgcgagaccgcacggctgatcgcagacggtgtcgcgccgagctgccgggcagcttccgagaaactgccggtttccaccactttggcaaataccgccatttcctcgagtaatgcgagggtttcatttgtgatcacagggaataaatcctttgcatttttgccgtattatcatatgacagtgcctgcaatacaatgtcagacaacacgacacaataataatgaggcacacatcaccatgacagaaaaatgctatctgaccagccgcgccttacagggcaccgccactgtcctggaatgccgtccggcagaggacgggcgctatgcggttatcctcgataaaaccctgttccatccgcagggtggcgggcaaccgggagacaccggcacactcggtgacgccactgttattcacaccgcttttatgccggaaggtatcattcattacaccgatataccggtcgcccccggtgaagttcagatgaatgtcgatgcggagaaacgtcagctgcactcgcggctgcataccggcggacacctgctctctcatgtgatggaaactttcggctggaaaccgaccaaaggacatcactggccggatgaagggaggatccagtatattcctgccggttccccggtgatcgtggatccggaagatgtccgccgccactgtcaggcgctgatcgacgcggatcactcctgtcatcactatcaggatgaggacggcatgtttcagatccgttttgcggattttgaaccttactcctgcggcggcacgcatgtgcagtcactcggcgagatcggcacactggtgctgaaatccgtgaaaaccaaaaagggcgttctgtccgttcagtacgacgtcatctgacggatcctgtctctctgcggcggcactcccgccgcccctgttaatctgctgaggttatgatgaatctgttcaaccagagtgaatttctggcgcttgcgctcgtccattttttcattgttgtctcgccggggccggactttgccgtgacactgcgccagagtatttatcacggacgcaaagccggactgatgaccgcactcggcattggcgccgggatttccgtgcatgtggtgtacacgctggctggtgtgacagccctgatgcaggccacaccgtggctgatggataccgcgaaatacattggtgcggcttatcttatctggctgggcattcagtttctgcgcagtaaaggcgcaagtgccgctatcgccccggagagcccggatagcgccccggtacaaacggccggcaaggcattttggatgggatttctgaccaacgccaccaacccgaaagcgatgctgtttttcctagccatgttcaccacgctggtcagtccgtccacgccggtgacggtgaaactgttctacggcgtgtggatgtgcggcgtgaatgcggcctggtttatggccgtttccgttttgttctcacaccagcgtatccgtgagcggttcctcgcacacagccggttgttcgacaatatcatcggcactattctgctgctgtttgccgggcggcttttgctggctgtataacggcaaggtaaccgccggtattatcagacagactccgaaattacaggcagaaaatcaaaagataatcgtccgccaatggcgtctgcataacgaatcaatgttcccagttgcgggtcatagtcccctttttccaggcgggaaatattctgtttttgcgtcgccattttttcagccacttcagcctgggtaattttccgggcttttctcgctgcttttaatgtatccagcaatacttttcgtgcctgaatttcatccagtgcatcaatgacttcaggatctttaagtaatgtatttttcagctcttcaaaagggactaaatcataatcatcattacgactcatttcagcctccttatcatttctttcattctctcatgtgctaactctagcacctgctttggtgttttctgcgtttttttctgaaagacatgcacaataattatatggtttccccagtaaaaaaagaaaacccctctagcacacccttcatgagaacggatcctcagctccttcagcccgtcacgatgaaggtcacggacaaccggttcttttagaaatgcaccgtatttacgcagggtttcaagcccggtcagcatctcagctttaagtcctgcgggtagcttcatgatctctttttctgctgctttaatcactgaaagttcaaacatccttcatcccaatgttttcttttcagtttatcgtccgcactaaatgtaatcaaatatgattactgtataccataactctattcaatatggcaaaaaaataaatttggtaattaatgctgccttttgcagttatagccaaattcattgccacgttaatagtttgatatggtaatgtttaaggacgttaataaatacgtgcagttacgttctcatgtatttacgccttgttgtcccgatgaggccgttccggcgctcatcagtcacccggacagaacggagaaaataatgattaaactgaaagatatagaacaggctttgcgtcctcagccatcctacaaaatgctgattaacggccagtgggtcgaaagcagtgatcacgctaaaagccagacatttaaccccgcaaccggtgaattactggcagattatccggccggtaccgcgcaggatgtcaacacagcggttgccgccgccaaaaagacctttgaaacctggcgccatacctctcctgcggaacgtcagcaactgttactgaaaattgccgaccgtctggaagccgaaaaagaacgcttcgccaccctggaatccctcgataacggtaagccgtataatgaggccatttccatcgatttaccggccgcgattgaccatttccgctactttgcaggggctatccgcgcccattccgaccaggccgatgtactggacgaaaacaccctgagtctggtgatccgtgagccgctcggcgttgtcggtcagattatcccgtggaacttcccgctgctgatggcagcctggaaactggcgccggtcattgccgccggagataccgtggtgataaacccggccagcctgaccccgctgaccctgctggaactgggccgcatcctgaatgatgtgctgcctgccggggtgattaatattgttaccggtcgcggctctgtggtcggccaggcgattcttgaccatccggatgtggacaaagtggcgttcaccggctccaccagcgttggttacactgttgctgctgccgccgcgaaaaaactgatcccggccactctggaactgggcggtaaatcggcgaatatcgtgttcccggatgccaatatggaaaaagccgtcaaatatgcagctatcgcgatcctgatgaaccagggtcaggcctgtgaatccggttcacgcctgttcctgcacaaagatattcacgatgagttcctgaaaaaactgaaagcccgttttgaatctgtcaaagtcggcgatccgatggcgaaagacactcagatgggcagccaggtcagtcagggacagctcgataccatcctcagctatgtggaactggcgaaaaaagagggtgccaccatcctcaccggcggcgaacgcctgaccagtgacgggctggatgccgggttctttatgaagccgacgattatcaccaatgtcaccaatcagatgcgggttgcccgcgaagaaattttcggaccagtactggtggtgatcccgttcagtgatgaagatgaagttgtcgcgatggcaaatgattccgagtacgggctgggtggtgcggtttggacacaggatatcaaccgcgcactgcgtgtggcgaaagcggtcagaaccggccgtatgtgggtgaatacctatcatgagctgccggctcatgccccgttcggcggttataaaaactccgggctgggacgggaaacccataaaatgatgctggatgcctataccgaagtgaaaaacatctatatcagcaccaaagagtcataattaacgtaaatgcccggcgacgccgggcatttttttacttatttattgcttttcgcttcaggtggcgggtttttcccggcagatcgcgcaatactgtacatctgctgcatcatcatctgatccgcagtttccgccacaataatcacatagcgccgctctttctggtcatagcggaaataggtgcattccggcttaccccagcggttgtaatagatcgcgccgttctcttcctgatagataatgcctttctgctgattcagccattcatcaaaacgccagcggtatttcgggactttcaccagatgaataataccttccgcgtcactgagcggatcacggaagcggtaaatctccgtattatcatcatcgctttcaatatgaaggccgccgatatcgcggacataatcgccgccctcctgttttttcaggtcgatggccattgtttccggcagcgtgactgagatattttctgtcattctgatggtgtcaccgggaaccggcgggaagccgttctctttgtaatactgacgctgcgtttccagataagcttcataggaggcggctctgacatcagataccgctttcattccggccagtttttcggaggtatgatcggcacgggaaagggtcattttcagggtacagttaaagaagccgcacgcgccctctttttccgtggtcagatagacggtttgtccgctgtccggtgatgtccaggtcgtctgtatattattcagatcaaaggtatcgccatgaatatcactgtcaaaacggttaccgctgttatccacagtgactctgcccggctcaaaccagaagaatgtggagtctttcaggctgaccatggtgtcgcggattgcggctttgacatttttttccggatcactgttctccggcgcattatccgccgggttatcatacgtgacggtaatatcatcaatcacataatatccgtccggtgcaggcggcggggtttccttacatccggccagcaatgcaatcaccacagataaaaatacgccccttttcatgactcatcctttatttaatcaccggaaacccgttgtgatcatagcgcaaagaatgagaaatcctgaccggaattatccttaagtgtatttatctgtccgccatggggtatgataactcccctgtttgttccggcccggggaaaggacaatggccattatcacaacactgatcacaggcgccttaaccgggctgattatcagcaccaccggtgtcggcggcggagtgatagtgctgccaatcctgacgtatctctacggcatgaatgccctgatggccgtcgccaccgccaatcttctctccatgctgatgaaggtcgcctcctcctggctgcactacaaactcggcaatattccgctccggcgcgccatgattgtgctggggattatgctgcccgccaccttcggtgccagtctgctggtgacatggcttgcctcggtaccggcctggcaggcgatcacagaaaagagtattaatctgctggtcgtggcggcgatcctgttttcactgtggctgtttattcagcggatgtttttcccgcctccgttaccggcgaatacggctgaaacccccatgtcagtacgggagcttttgctgccggggatcaccgccggtgtggtactgggggcaacgggggtcggcggcgggattgtggtgctgccgatgctgctgcgctatgcaaagatggatatccgtcaggctatcggcacctctatttttgtcaccaccctgctctccggctcttctgctattgcctatatgcaggacggacacacggatgtccgtctcgcgttgtggctgtttgccgggtccctgctcagtatgccgctgaccaaaattctgctcacgcggatgccggatcgcgcttttcagtacgccacgctgatccttatcctgtgcagcgcagtgatgatgacactgaatctgttctaaaccgtcaccacaccctgagcctgtaacgcctccgccagacggcggatgccatcggtgagtttctccgccggataagcggcaaacccgaataataccccttcctgcggtgcatccggacggcagtaacgggccagcggctgcatgcccatgccgcactgccgtcctgcctgaatcaccgtctgtgccggaacaccgtttttcatcctgcataacaggtggatccccgagtcactcggcacaatatccagcagttcaggaaggtattgattaatggcatccgtcaccgcctgccgccgctcataacaggctttgcgcacccgacggacatgccgtgcatagtgaccttcattaataaaccgggtcagcgtggcctgctccagatagccgcagccggtatcggcataatattttgtcacctcaaaggccgggatcagcgctttcggtacgacgagaaatcccagccggaaggccggatagagcattttggaaaacgttcccgcataaatcacccgctgatgcctgtccagcccctgcaatgcctgaagcggacgatcggcataacggaactcaccgttataatcatcctccaggatccagacatggtgttttgccgcccaggagagcagcgccgatcgccgggccaggctgagtgtgccgccgccgggaaactgatgtgacggtgcggtgaacaccagtttcgcgtccggccagcggcgcaggccgtcatacacatccatgccctcttcatccgcgcgtaccggacgtactgtcagccgctgtgataaaaacgccccgcgcgcaccatcatagccggggtcatccagccagacttcatccccgggctgtaacagcgtctgcactgtcaggttaatcgcctgctgggtgccgttgacaatcaggatctggtcctcatcgcactgcaatccgcgggtggcacggacataatgacagattgcccggcgcagcggctggtagccgtgcggctcactgtgcgtatgcagcgcatagcgggactgacgccagacacggcctagcagccgcccccagacatcatgcggaaacagatccacacatccggtaccgaccataaacagtgcatcggacggcgcaccggatgcaacacgctgtgactgcaatatttctgccagcgggctgatattggcggtcacctgctccccggcctcatccgccggggatgccaccggtccgctgatggcgtgatccggcagattatccgccacaaaggtacccgcgccgcgccgggtgatgagataaccctcatcctgcaaccgctcaaacccggcaatcaccgagttacgggagatccccatcatctccgccagcgcccgcccggacggcactttgctgcccgcatgcaggcggccgctgaggatcgcctcacgcagagcgtgatacacctgatctttgatgatcccgttacctgtcagtaattcgggaaacgctgccgcgccggattttcgcatagtggcctaaagtggatctgttaaaaatataaaaagtgtatcttataaagaaccaaaataacacgtactcttcacatcacggaaaacgcgcgttttcttcacaacagcagaatgcagaataatgagggaaacaccatgaataatacaatgacatcatccgtaccggatctggtgacagtggcgcctgccacacagaatgattatgcgggctggctgccgcactggctggcctatcaggaattttataaagtcagctttccggaagaggtcacgctgaccagctggtcacgtttctttgatgaaaaagaaccgatgttctgtgccgtggcgcggatgaacggcaaagtcaccgggttcgtgcattatctctatcaccgctccacctgggcggaaaaagagttttgttacctggaagacctgtatgtggatccgtctgtgcgcggccagcatatcggcaaacagctgattgagtttgtacagcagcaggcgctggcacgtccgtgcggccgtctctactggcacacccataaagataatacccgtggccagcgtctgtatgactgggtggcaaataaatccggtgctatcgaatatattatgccactgaaatgatggcagtcatgtcctataaaaaaggcccgtttccgggccttcagggggatgatcagttcttaaaggaactgataaacgagaggtactcttctttactcatcagcggcttatattccgccatcagggcttccgcaccggcggcatcatcaaacagcaaatcaataattgtcattgccatcatctgagccggacggatataggccatgtcgtcatcaaaaacgacataatctttgccgtgcagcccgccgcgcactgaaccaatccacggatgactgaccggcatgatatgggacagatccccggtgtcagtactgccggtcatatgctcggcaacccagacattttcatcaccaatcagaccttccgcattctgctgtaacagatcattcagtacgtcattgttgtacagcggcagatagcccggtaaatctttcacttccacttcggcaccgacagacatggcgccggctaccagcgcacgggtaatacgctcgttggcatcgatcatcgccggtacgtttgaggcacggacataactttccatgcgcacatcactcggggtcacgttcaccagatcaccgccctgggtgatgatcgggtggaaacggatataatccttctcctgaaaggtttcacggatagcattcacacccatgatacccatcattgccgcattcagggcgttaatccccatatgcggtgccgccgcagcatgtgtcggtttgcctttgtaattaatcagcttgccgataaaaccgttggtggtggtggagatttcaataaatccgttgtcacgctcaggtttgacgctggtcaggtggatctgcatcgccatatccacatcatcaaactcaccgagggaaatcagctccggcttaccgccgatataacttattttgccctgttcgataagcttgttgcggtacgcgagttccacatattcctcagccggaacggcgaagggcactacatcccccgccagatattccatcgccccggaatccaccagccccatagtgaccgccatcatattggcgatctgcgcattgtgaccacagcagtgtgccgcgccggtctggtcatccgcatcagggtgttcagcacagataatggcatccagctcaccgatcaccgcgacactgcgtttactgccttttccgcctttcaggcgggctttgaccccggtgagcgccagctgattacggtagctgacacccagagaatcaaatgccgcttcgaccttcttcgctgtgcgggtctctttataacccagctccggctctgcccagatattctctgccagttttttaatgtcacccttgcgggcggcaatcgcttcgcagactttggctttcagttgttctttggtcattgtcatgctgaatattcccctctgatcagataacgccactccatgtgagcgtcagttggccgataagtgcggcaaataagaatgtcccggagaataccgccagtgacaccgggataatgcgccatgaaatcgctttgaatttatcgatatctttacccagtgaaagacccgcgaaggccagtactgtggtactgataaccgcgatagagactttaccggtcatggcaatcatttctttgtcatacgggaacagcggtgaacacagaccggcggcgatcagggaaacccagaagatcaccggcagtttgcctaacggcgggatcatcgcgatcaggtatgccgcgaaggacataccgcccagcagtgtcatcgccagcagtgtatcgctgaacacctgcccgaactcaccacggccgtacattgacccgccgactgcatcgccgagcgcggtaaagaacaccaccagaaccaggattatggctatttctgtcatctttttcatgattagttatccttattcagtatccgcagacgccgttgcacgttttcttttcagtttgttgtacagataagacgcaaacggtaaggagaagaaaatatagatgtacagacctaacacagaagacatcaggttcgcggaagacgagaacgcctgaatatccgcagcctggtcaggatagagttccagcagaggggcaaccgccgccgccagcatcgagccgctgccgacacccgcacccattgccagagcaagcggactgagaatgtccagaccggcgatcacactcgcgaggatccccatccagacagcaccgtacagcgtaccgcagatatacattgccatgacaccgcggccttccggcgaacttaagccgtatttggcttcgatgatggcgatgttcggctcacggccgacagaataggtggcaccgaccgcttcacggcccatacctaacataatcgccagcggcagacccagcataatggtaccgataaagtggcccacttcctgcagaaccagcgcaccaccggcctgaatgattttttcccaggaggccccgacggaagtactcagcttggcgatcaggatcaccagtgccacactcatgatagaggtcgcatgcgccatgttcttttcgttgaggattttaaatttcggaaagctgataataccacccatcagcatggagtagagcatcggaaaaaccatcaccagactgattttaatttgccctatcgcttccgcaagaagaatgataaataagctaaccaaaagcaacttactatcttttaatatatccatagtgttacctttataggaattgttattgagaattactcgtgtgtatttatataaaaaacgtaccctttccatattcatactacccgcgggactgttttcctgacaatattccgaaaattcctcagccatgccttttgggcatgccataaattaataaattaatatttattgattaaccctgtcctgactacttatttcgggttactaattaatagataattcgttaaatttcaatgtgatataaaatgctataattttgtgaaaaacattattcgataagtgatattggttttgattaaaataaaaagagaaatattcaaataagacaataatgtgaagcggctcctgtttttttaattttccggtccgctgattttaatgagaatgattttatataatgatgaaaaccccgttttaatactgaatttattcaggaggtaccgagatgaacatcttattacaccttccaatcaccgttatggcaaaatatttgactggcagtaaaaaatcaccattgtaacggataacatgaataaatcagatgtagatcacattattttatcaatatggacacaggtcacaatattgactattaacccggccctcagcacagaaatccggaaaaccgtgttgtactgaacgggtttcatccgctggtattcctccggcaggctgtttttcacacaaacgcagaaaacccgggtaaacacagcagaattgatcgctgagtgcctaattgcgttgcttaattgttaccggattgtgggtttctttttctgtccgtaaatctgtttcatcaggtctcagaaatattttgcatttgctcacgcataattacttaaaaaacacatcggtatcagagtataccctcatgtaaacaccacggataataaataaaattttcttaactgtgatgcaggctgcaatatcctaaatcacggataacgccttacatcttaagatgagtatgccgtgtgactgacatcaccgttgctataattataaataaaattgcattatttattttcggctgtaatccatttttctccctgattaattattgcgataaaactaaacaataaaactaatcacttttgtatatgattaaaatcaaacactttttgtaaatagtgattatgtcctgtgatgagcatattaagattgggattagtggttaaatgcatgaccattagttaactaattacatttaatcactataaatatgacttaatgtaacatatgaaaaaagcaaacaggaaatgacaccaaacaatccgctattttttagtcagtttccgtgaaagagttttgttcatatgcaatatataatttcatttcttacccgggtaataatatttaaatttaaatgttatcgcaatataaaaaatagcagtatttgcatgacaattgacactctaataaacaattatgataatactgcggtattcaaagaatattgctcagaattattattaaattatcccggcttgagcctcacgggattatttatttaataatataaataaaacagattattcttaaatattgacgaatatccctgataaaggaaataacatgaaacttcagaaagtattactctcagtagttctgggatctttatttgctgcgggtactgctatggcagaagatcctgtgcaaccgccagaagtaaaaagcggtctcggtaccgtgcattttaaaggcttcattaataacgtgccttgctctatcgacagtaaattcctggatcagacagtggatttcggtgaaatcagccgtaacgaactgactaccggtacttaccgtacagatagcaaaacattcaatatcgaactgaaaaactgtgataccaccacgtataaaactgcgcagattcaattcactgcaccaacagttgaactgaaagacggtactgcaacatctaaatatgttggtctgggttcaatccagaatgccggtatcgcactgacagacagcggcggtaaatctatcgaactgggttcacgtttccctgctgaaaaatacaccctgaacggtggccgtgatcaaatcactccgctgaactttgcagcgtatgtaaaaggtaaccagtctgcagttgccggtgaacaggctactaccggtcacttcgataccccggttaacttccagattttctatcaataacaggatagttactgaatagttctttttaatatatgcagtggtctgcaaggacagctcccgccactgcataatagattagcggtggctggcatatctcatgaagctcagaacaacaattaaaatatttacagcttctgtggttgcagttattcagataaataccgcatttgctgaagaagccattaactttaatacatcatttttagactcagacagtcaggaaattgatttttcaaaattcagccgggctaattatgttatgccgggtacttatcttctggcaactaaactcaataataatgttattaccagtgatgagaatatccttttttatatcccggaatatgatcctgaaataacagtcccctgtattacccctgaattatttgcacaacttgccatgaaagaagagtggcagaataaagtcagctggacagcgcaggataaattgcagtgccttgatatccgtaccattcctgatatgcaggcaacgggtgatatcgcggataataaactcaatatccggatcccccaagcctatatggcctacagcgatccgtcatgggatccgccggagcgctgggatgacggtatcgccggatttttattcgactataacgccaccgccacgcacagcaaataccagccgggcagtgataacgataaaagcagcaagacggatgtagtcagctacggtgataccggcgtcaacctcggtgcatggcgtgtgcgtgcggaatggcaggcgaccggcggcgacaacgcggagcactcaaaacgctggcgctggaaccagatctacgcttaccgggcactccgggatctcagcgcccgtctgatattcggtgaacagtatctgacctcagaactgtttgaaagcttccgctacatcggcatgagcatggaaaccgatgaaaatatgttcccgccgctgctgcgcggttatgcgccggaagttgccggggttgcccgcaccaacgccaccgtaatcatccgccggggtgaacgtatcatttatcaggagcaggtcagtaaaggaccgttccgtatccgtgatatgaactacatcggcgacggtacgttaaatgtcactattaaagagcaggatggcagcgaacagcatttcaccatcgaaacatcccgcctgtcgatgctgacccgtcccggccagttcctgtttaaactggcgaccggtaaaccgctgtcagacgatcacaaaaccgaaggcccggaattcggtacagggagtttttcccgggggatgagcaacaacaccacgctgttcagcggcgtactggcggcgacggattaccagaacgtgtctttcgggataggccgggatatcgcaccattcggggtattttccgcgaaagtctcctattcccgggcaaacatgggtgattttgcagataaacaaaataaaaccggcggctcttacagcatcacctattccaaagaattcgataccattaacagtcagctgaccttcgccggttaccgcttctcggagcgggattacatgaccatgaaccagtttgtcgatctgcgttaccgaggcggtaataccgacaacagcaaagagatgtataacatcatctttaacaaggtgttcccgtctctgcgcatgaacgtctatctgaactacagtcatcagacattctggaataaagcgagcatcaataactacagcatgaccctctcccgcaactttgactggggagagaaaaagaacctcagcatgagtatgtcagcctaccggacagaatcggattcaacaaaagataacggcgtctacgccagcctctctgttccgcttgatgataataaaggcatgttcagctacagcggcagttacaataagaactctcacagtaataacgttaactattacactgatattgataattcgagtaactattcactgtctgccggtgaaggcgacggcaaagtcaacctcgccggtttctataccaatgaaggggggaataactacctttcactgagcggaacctatattcaggataacgttcttacggtatccggccagtcacgcggcggctttaccctgacccgtgaaggtgcggcattccaccgcagcggcaacagtatggcaccgcgcattctggtggataccagcggcacaccggacattgatgtgcgtggtaccggcaaagcggtgcggagtaacgccttcgggaaagcgattatcccgaccgcgacggcctactcacgcggccagctgtctcttgatctcgatgccatgccggataatgccgaagccctgacatccgtgcagcaggcaacactgacctccggcgcgatcggttaccggaaatttaatgttgtcgaaggctataaaatcatgggtattattgctatgaatgataatactcatccgccattcggcgcctctgtcatgaatgacaaaaatgcggagatcggcattgtggccgataacggatcggcttatctgaccgggatacaaccgggccagaagctgactgtagcctggaacggacagacacaatgtactgtccggatcccggaaataaaggatgataacgttcagtttaatatgctgctgccatgccggtaaatccggcggcaccggtatgtattttacagaattaacagatgaatccgtaaggaaccttaacatgagaaaagtgaccaccttattctgcgccgcactgaccaccctggccgccattccggtaaccgcgggagccgccatcgcactcgacagaacccgtgttatttataacgaaggtgataaagctgtgccgctgacggtcaccaatgagcacctcagcaaaccgtatctggcgcagtcctggattgagaacagcaccggacagaaaatcacatcaccggtatttgtcactccgccggtgcagcggattgagcctgaccgcaaaagccagattaaagtgcagctctctccggaagccgcctcattaccggctgaccgcgaatcggtcttttatctgaacgtccgtgaaattccgccggccgttgagaaaagcaacgtgctgcaaattgccctgcaaaccaagatcaaactgttctaccgcccgaaagcgattcaggttcaggagcggatggaaaaaatcgccggtgcggatggcatccgtctgtcacagaatggcgggcagtacaccattgaaaacaccacgccgtaccatctttcagtcactcgtctggatgccaccggcggaaaagaagtgaaatttgagccggtgatggtatcaccaaaagcctccgcgtccttcagtgctccggcgctgggtaatgcgccggttgtttattacgtcaatgactacggtgataccaaaccactgaaattcagctgtgccggcagcagctgtaccgtgcagtcagacagtaaataattaacaggaggaaccgccgatgacactgaccatgcttttccgtaccggctgcgcggcactgttgtgcctgccgctgatggtctccggcggttcttacacctatatcgatgtgtatgtccgtggggagatatttatcgcgccctgcaaaattaatcagggcaataatatcctgattgatttcaaagatgtcaccaccacccggatagacaatgataattaccgtgaaaaactggattaccggatcgagtgtcaggataaccgcgcccgtgccatgaagctgtatattaccggcaccccttcctccgtcgattcgcgttatctttccaccagcgtcagtgaccttgcggtgaaattcctggcggataacaaactgatgccgctgaatgaaaagatgaccattcagtatccggtacaacccgaaatcatggtgattctggcaaaaaaaccggcggtaaaactgcctgccggtgaattcaatgccacggccaccatccatatcgattatgaataaggaattgtgatgcgacatttaatcacagctctgatgctgtcctgtcttgctctgccggtgtatgccggtacaggagtagcacacagttccgccaatatccggatcaccggaagtcttcagccgccgccgccctgtaaagtgaataacaacgaggaaatcctggtcgattttcagcgcatccagataaaaatgctggaaaagtcagatatccgcaaagatgtggatatcccctttgtctgtgagcaggactcagagaatttcaaatatttcctcaccgttgacgggccgcgggcacagttcaataacaaactggtgaaaaccaaccagaataacgtgggctttaatattgaactcgccggggtgaaactggatttgggcaaagcgcagctggtgagcagccgccatctgacattaaccattgtgctgaccaaaaaccctaacggggacgtcacgcccggctccttcagcggcaccggcactgtaacgatggagtatttctgatgaaccgccctgctgctttcagtctgttattcagcgccgcactgacattctctgccgtctttattccggcggggcacgccgccgataacctgcgagtgatcggcgagctgtacaatgacccctgcacgctgttaccggaaaataaagatctggtggtggatttcagtgatgtttcactgccggatttgtatgagggggttgaggtccgcaaatcattctccctgatcctgtctgactgcgatatcacggatatgaaccggtttaagattaaattcaccgggaccccggatatgccgtcctatctggcgctggatccgtccagtgacgcaggcgggtttgccatcggcgtgcggatagataatattccgctgatcccgctgaatcagttttccaacaccattaccattgccggaaacggtgagaacaacatccgttttaccgcttttttgcaggttgatccgaaagcaaaaaccggtaaaaccattaagtacggcgcgtttaattccaccgcgtttctgactatcgactatttctgaggtcggtatgaccaagatcctccgttatctcactgtgctgaccactctccttttatttgtgctgcctgcacaggcaacactgtacagctatattacccgctctgaaggtaaaccggcagatatcgattattactaccggattactgcctggactccgctgccggcgggcagcgtgcatccttgtgtgaaagtcggtctgacaaaaaaatgctacgccaatattaatcaccgccacacaaacgcagaccggggtggggtatcctcccgtaataacagcgaatttgaggggcgctgccggaatatgaacctgatgacactgccggatgccacagctgtttataactatatttataataactgtttcggcggactgccgtttgaggggcagaccaatcacaaaggtgacgctatccgtaacgaatgtgtgaccctctttttaaccagcagcccgaccggtggtaacggttatatgtatccggattctgtctgtggcgtagctcccccgccgggcggaatttgcagttttacggctgactatccgagcgccattctcgatcatggccggataccggataatgaaattaacggcaatcaggccagtcagtatctgagaatgaaatgcagcaaagatgccactgtccggatctactccgtgagtgatacggaatcccggctgagactaaaaaacaatctctacagcagactgacactgaacggctatccgctgaactcatccggcggtggtgtaccggtttatgtacgcggggattatgaagcaaacgcactgctgaaaagcacactggaaaccaccgggccggtggaagccgggccttttatcggtaatatatccattgttatgaccattgactgatcgtctttacacgccggtattcccgtaccggcgcttttcctcctgccgcccttttcgtgtagaatagccgtacttttcaccaccaccgcagggcttccatgaagaatgtcgattataaatcactgagattgctcgatcttattatcaaagaacagggattcgagaaagcctcagcgaaactctttattacacaatcggcagtttcccagcgggtaaaacagctggaaaatcaggtcggttccctgctgctgacacgcaccgtgccgccgaaaccgaccgaactcgggcaaaagctgctgggtctgctttatcatgttgatttaattgagcatgatgcctttgataatgaaagcggcaaccatgtggtcaccatccctatctccattaacgccgactccctcgcgacctggtttttatccgctatcaagccgatcctggatgaccgcgccattcgtctggatattaaggtggatgatgagagccggacactcgactatctgctcaaaggggaagcggtcggggcaatcagtatgcagccgctgcctgctgtcggcggaacctgtgattatctgggggcgatggattatatttttgtctcgagcccggcctttgcggaaaaatatttcagcaaaggagtgaccaaagagaccctgctgcgggcgccggtggtgtcatttaaccattcgtcagatatgcaccatatctttttacaggagtatttccgtttaacgccgggaagcctgaacagccatatagtgccgtcatcagaggcctatattcagctggtactgcaaaactccgcctgctgtatgattgcggaacatcagattaaacatgagcttgaatccggacggatgatcaatctggtaccggaactggtgcagcaaaaacagctttactggcatcgttaccagccggaatccggcacattacagcggatttcagaggcgattattaataatgccaaagattatctgacccaatccccggtgaccgcctgagcggcggccaccacaggatctgacggggttacagagactgcccggctgagccgaacagacgcatccgttcttccacccgctccgcgaccggctgcaatcctttcataatcactttgcgcggatcgttgatatcatgcgcgccctgctgttcaaactgctctttcacggacaggcaccacgcatacatattttccgtattaacgttgatcttcgccgtaccgagtgaaatggctttcttcatgtcctcgtctgaaataccggttccgccgtgcagtaccagcggtactttcaccagctgcgcgatatgctgcatttccgcaaaaccgagcttcgccttgcctttatacagcccgtgagtcgagccgagcgccgccgccaggcaatccaccccggtttcttccaccagcttctgacactctgccgggtccgcataaatgacgtgagaattcacaataccgtcctcgctgcccgcgatggtgcccagctcggcttccacagacacaccacggcggtgcgcgtaagtcaccaggcgtttggtgattgccaggttttcggcaaacggcatctgtgaaccgtcgaacatcacagaactgaaaccggctttaattgccgcttcacaggcttcataagactggccgtgatccagatgcagtgccaccggcacatctatttccagaaactccatcgcattcaccacaatatcgtgaatacatttcagcccgagcatatgttttatggttccgccggagacacctaaaataaccggggaacgcagttgctgtgcaacttttaataccgttccggtccactccaggttattaatattaaactggccgacggcgtactggcgtgcaaatgcacgattgagcatattctccatcgaaactaacatcggatttccccttgttggcgtataactgtaatttaatcaaaaaccagaattaatcaaaatcagaatttaatcaaaatagtgtttcagatttctttcgtatttattcaccgcattatggacatccgccaaatccggcattgattcgcgcaccccttttttctcaattgagatggctgctgacagactggcaaataaaataatattctcaatatgccagttataatgaactccgtacgtaaatgcgccgtggaatatatcaccggctcctgttgtatcaatcgcattacagataaatgccggtgatattgtcagcattccgttttgcagatacgcacagcctttctcacccagcgtaataaatgcctcaccccgggccagtttattcagttccgttaatgccgtttttaactgaatatcggtggtgaatttatcaatctcaatcagatcacgggcaaagttttcactggcgaccagataatcggtatatttcgccagatttaaattgctttcccgcagtgaccccgcgtccatcacgacgcgggcatcaggcagacgggtcagaatatattcactcagctccggttcatgaccatcaattaataccgtgatgacttcccctttatcctcctgtgtcaggcgggtaatcagctcatcaattttcagtttctcttcaaatgtcatacgcggcggagagaccagcttgcgcgtaataattgtccgggaaccatttaactgattaactaatacagatgccagcggtgtgatcatttcatcgttaaaaataacgtaatcggtattcacacccacatcatgaaactcatcaataattttctgaccgtagatatcgtggttgaggtgtccggtaaaataaatatcctctccccacaatcccagtaaccatgccgcattggcacagggtccgccgccgctttcaataaaatcaccggagaaatttttggtattctcctccggccagcggttaagaaagaagaactggtcgaagcaggataaaccgacagaaattactgccataacaactccttaaaacctttcgtcagtatcatatttacttatgtgcgcggtctttttccattaattcgtcatagctcagggtatcccccaccactttgactgatttaaaggcaaacggcgccagtaatgccagaaccagaacaaaacaaatcaggtaaatcgcaatctgaccgaagtgggtaaaggcttcaccgataacaatgccccacaccgcgaagtcaaagtctgcaaaggtactgttttcaaagcccaggttgcccagcgccggtaacagcatggccggtaagaatgcgaggaaaataccgccgataaaggaggcgataatacagccctttttgccgcccagtttgtccgcaaatacaccggatgtaccgccgcagaagaagtgcggcaccatgcccgggataatcagcgccatacccagaccacccagcatcagcatgccgacaaggccgccgataaaggagctgataaaaccgattaccaccgcagtcgggctgaaggtaaagaagacagcacagtcaaccgccggaatcgagttcgggatcagtttctggctgataccctggaacgcaggtaccaggtcacccaggattaaacgcacaccgctgtagacaatcgccacacccaccgcgaactgcagaccggtcaggatggagaagatcaccatattctgctcagtgatggtgctgatataagcggaaccggcaacgatgctgcacaccagataaatcacgaccatcacaataccggttgttactgtggtatcgcgcaggaagccccatttttcggagatctcagtatccgcaaatgagttttctgctttaccgactttcgccgcaatccaggcagacaggtaataaccgagggaaccaaagtgccccatggcaataccgccgtcttcagtaacgcgcttggtataacgctgtccgattgccggtgaaatagctgaccaggcacccagcaggaaaccgccgataataaccatttcccagcctttgaaattcgcggcctgtaatactgccgagaataaacaggctaaaaagaaagagtggtggccggttaaaaagatatatttatatttggtgaaacgggcaatcgccaggttgaaaataaagccgagtaataaaatactcattgtctccacacccagtaatttctgggcaacagaaacaatcgcttcgttattcggaataaccccccggatgttaaaaccggcttcaataataccaccaagcggattcaggtttgccacgataacaccggcacctgcactcagcattaaataaccgaggatcggttttaatgtcccggttaataatttattgaccggtgaccgtaatgccagtaaccccaccagggagataatccccataagaaaggcaggctgactgaatatctcagtcaggaatgagagaatataagccataatttaattcctgtaaaaagaatgaactatcaggattgactcagtttcagtaaagcgtctttaatatcttccgcaattttggctttatgcacataactgcggatcacggcaacttcacactgcggcggaaattgtgatgccagctctttaatcgtgacatacagatccgctttctcacccacggcattcgcaaaatccactgaagccacatcggcttttatgcccatctcctcacaaattttcttcacgttattggcggccattaatgagctgccgataccattgccgcacactgttcttattttaatcatgctgtcctctctatcgacgtccggataaactgtaaaatctgttctttgttattctcttttacaaactcagtaatattattttcaatcagatcagccacggtctgaatcagatgaatatgggtatctgaatctgtcgcgctgatagcaataatgacattgaccggatcaaactcctcatgatgaaataccagcggtgtgccggtcaccaccacggagaacgcggtttttaatgcccctttttccggtctcgcatggggcatcgccaccccggtatccagcacaatcaccgggccgaactcatgatatacgcggatcatttcctcaatataatcaggggtacatgcgcctgatttttgcagcaactcaccggcatagcggatgccctcttccggagatgcaaaattctgattcagggataacagcccgctctcaaaatgaatatccaaaaccgaactcctgatgtgattttttcttattttaaagatggcttatttacgcctaaataaatagcgacgaagatcacattccggttttaagaatgtgaagccgatctcgtttgcctgaaataacgctttatcgtgtaaagcaaaaaataatccagttaattcatataattactttttactgataatttcgctgtttttattttccgggctgaatatgtggcctgagtcatattttcactggtgaaaataagatgttcatcacatttttgagggtgttgagtcgtcactttgcggggcggatcaaattgaggggcaaaattgatttatttttaaccggtgataaaaaaagaagcccggcaacactgttttctgtgccgggcttttgtgctgtttttgctgataaacggataattactgcatcgtcacccagaacgtcccggcaccgctgatcgccgtaaaccgctgatggaatgacaccatttccgcctgcggattcaggtcactgaatgcctgcggatggaaaaatgcagccagtgcttcggcggcaaaaatattcagcgggctgttgtagaaattatggtaaaccgccatcacgtgctgtgatttcaccgcctccagtgaggctaatccctggcggttcatcagcgcattcatcactttttgcgccggttctgccggtgcgccgtacccgagcgtgaccgcctctgaacggcggttatactgtttccagtccgcaccggtcagcacatagaactgcgggttgagatgcagaatattttcaatgctgctttccgcgccgtttgccggcatcgtgtcgcgcaccaggttatcaccacccgcaatctccgccagttcgccgaatccggtacgtccgtataaacggcagcagtcattgccgaataacccggcattgctttcaatcagcacggacggtttttgctccggcagacgctgacgcagtgcggccagtttaagccggtagtattccgagaactccgcggcgcgcccttcggtttcaaacagtgtgccgataagctgaatacttttcggggtgttttctgtcatgtcactgcggaaatcgataaaaatcaccggaatacccgccgcttccagttgcggcagcaggttcgtacttttcatcagcccgtaggaggatttgtgcatcagtaccgcatccggcgacagtgccaacaggttttccgttgtaaaagtaccgtctttgcttttcggcagaaccggtaaccgcgccagttccggcgcggcctccagatatgctgcttccagatccggcgcataatgcgccagggtatcactccatccgctgagagaggaaaaatgggttttccccgccgcaatatccaccgccagaatgtcacgggcatccgcaagaaacagccgcttgaccggcgtattcaccgctacggaccgtccctgtaaatcggtgacaatttgcgtctgagcacgggctcccatgctcagcagcagcgtcatcattactatgaatatacgcataaaacgggtctcagaatgtcaccaggtaattcagtgcaaatgtgcggccgcgacctttatagctgtataagtccggtgcgccgtacgccgggctgtacaggataggtgcgcgctgtccccacacggtggtgtaatctttatccagcagattttcgaccgcaaagctgactttaccgaccggtaactgatagctgccgaggaaatcgacggtgttatatccgtccagtttctccccgtccgcatcggtcaggctgaaggattgctggctttgcagacgcagtgtccagtctgacggctcccaggccacatacgcggtgacttttgacggactggcaaacttcacgctccatttttcccactgatcgcccgctttggtctcggatttgatcaggttgaaattagtcccgacacgccagtcagtatctgcgatcgcgtaatccgccgccccttccacaccgtagatccggcgtttgtcatctttcaggaagatagtcatatctttcttattgatgtcgtagctgctgtcagacagtgaatagtacgccgccagctgggtttgcaggctgtccccggtgtaacgccagcccagttcgaaggagttgactttgatacctttgacccgcgtatcattgatgttcacactgttgagcagcggataatgaccactgaccggcgaaccgtaagtgccggtaccgtagaatttggcgatatccgggatttcaaagccctgggagaaattaaaccaagtctgttgtgtatcgctcaggttgagcagcaccccggcattaaataacaggttgttgtaatccgtttccccgcccggtaccgcatccgctgaagtggctttaccttccgcaatcagctgttgctgctgataaccgacaaaatcatccactttgtttttcgtgtactgataacgcataccgccgctcagggtcaccagcgggttgatgtcataactgctttgcagaaacgccgccatcgtggtggtggtatagcccggataacgcccggtattgtaggcggaatccagtgtcagtccgttgctttccttcgctttctgcagattaaagaacttctggttggcactgaatttttcatgctcggcatccgcgccgtacgtcagtgtcaggttatccagtggtttactgttaaaggtgactttaccaccgtagaaatcagttttctgctctgatgcactgatgctgctgaccacataatccggctttttaccgcccagcgccgggaacggatagaaggtctgggtttcgtcacggtaatacgcctgcgccaccagatcctgtcccagcaggtcactgttgctgtactgcaggttcaccatatggcgtttggtgcccgggatccggtcagaatccagtttgtcgctgttatgcgcagtgccttttcccagtaccgccgcaaaatctttgcccagatcgatcccgtgtttgccgtcagattcactgttgtaatactgcgccatcagttccagtgactggtggtcatcaatcgtcagagttccggagcccatcacatccaggcggtcagaatactgaagcccggtctgggtgttatcgatcaggatttcgcggcctttgccgtcataccagccgccgtaacgctgataagccacagataagcgcccgtaagcctgatcattaccaccgctgactgcggcagccacgttttcatcatgatccgaaccgttgcggaacccgcttttgccgccgatctgaacctcaacctgtttttcttcctgaccttttttggtcacgatattaatcagaccaccgctgctgccgccaccgtacagggaggtcgcaccggaaataacttcaatatgattgatattgaacggatcaatcgaatccagctgacggctgtcactgcgtgatgaattcaggcgcacaccgtccaccatcacaatcatagagcgcccgcgcatattcatgccgtagtttgtccgcccctggccgctgacactcatccccgggatcagctgcgccaggatatctttcagctcttttccgccttccgcctgctgcgcgatatccgcattatcaatgacccaggtggtctgggccatttcagaaactgtccggtagctgcgcgaagcagagaccacaatcggttcgccggaatcggcagaagttgccgccaggacatccggtgtgattaacagggtcaggcagggtgtcagaagacagagagagcggatgcgcattggtatctttcctgtggagatcaaaaaagttcattatcaggctgctgataatattgactgagaatgattatcacaagaagaaatattccccgcttgctttttatatttgattttcagggggtgactattcactgtggtataatcggaaccggatacttccctcttaactcactgattttcagataaggaatcccatgcgacctgcggactatctgcggcttaccctgctggcggccatctggggtgccagctttctttttatgcgggtggcctccccgcagttcggcgcggttaacacggcctttctgcgtgtctttttcggctgtgccggacttctggtgatcctccttatcatgcgccgcaccttccggtttgacggaaaattaaaaccggcattattactgggcgtgattaactccggcattcccttttttatgtactgtctggccgcgcagtggctgccggccggttactccgccattctcaacgccaccacgccgctgatgggggcgctgatcggctttgctttctttgccgaaaccctgaccgcccgcaaatggctgggggtgatgatgggactggccgggattgtggtgatcaccacggtcggggaaagtcagtcttccgcccatttattatggggcgtggccgcctgtctgcttgccaccgcctgttacgggctggcgggattcctgacgcggcgctggatcagtgaaaaaggcggtctggatgcccgtctggttgcgttcggcagccagctcggtgccacgctgttcctgctgccgtttttcggtttcagtgtcacgaccggcccggcggttaactgggcacagccgatggtctggggcagtgtgattgcggtggggctgctctgtacggcagtggcgtatattctctatttccgcctgattgcggatatcggcccgatgcgctcactgacagtgacctttctgatcccgccgttcggtattttgtggggttatcttgtgcttgatgagacactcagcccgaatttcttcctcggtgcgctgattgtctgtgtggcagtctggctgctggtcagccggggcaaacagcccgcagcggtaaaataattcaccgggcggcatccgcccggatgccgccgttttgccgggataacttacaccggctctgccagtctcagtatcaccgtatccagcagtacctgtgcgccgcgtatcagatcagcatcttcggtatattcagccgggttatggctgattccgttcttactcggcacaaaaatcatcgctgccggcgctatccgcgcaatcatctgcgcatcatgtccggcaccagacggcatacgacggtatgcactcccggcggctctggccgcattctccacacagctgaccagggttttatcaaacaccaccggctgaaaacgcgccaactgacgggctgagaccgtaaccccttcctgctctgataacaccgccagataatcgcggatctgcccttccgcccattgcaggcgctcttcgtccgggtcccgcatatcaatggtgaacgttgccgagcccgggatcacgttaaccgcattcggctcaaaagcaatcgtccccaccgtggttaatgtggccccgtttttctgagaaatgccttcgcgcagaaaggtgatcagcttcgctgccgcatatccggcatcatgacgcagccgtgtcggcgtggttccggcatggtttgccgtgccggtgatggtgattttctgccacgagataccctgtaagctctccaccaccccgatctgtaatccttccgcctccagcaccggtccctgctcaatatgcagttccagatactcgtgcggcacaatgctgcccggcaccatactgcccgcataaccggcgcgttccagctcatcacgcagcactgcaccgtcagtggccaccgcattcagagcatcttccagcggataaccgcccgcatacaccagcgagcccatcatatccggatgaaaacgcacaccttcttcgttagtgaatgccgccaccgtgatcggacgggacggcagcacaccggcttcccggaaggcccggactaccgccaggccgctgagcacgccgtagcagccatccagtgccccggcgttaatcaccgtatcgatatgtgaccctatcatcagcggcgcggtatcgctgtttccggaaactgacggcagtgtgccgaaaatgtttccgatctgatcaatacggatcaccagatccagcgctttcatccagctgaccaccaggtcacgcccctgcttttccgcatcggtcagcgctgtccgcgtccgcccgccttttaccggatccgccccggcatttcccagttcctgcaaatgattcagtaaggtctttccgtctatcttcagcccaccggatttgtgattcatgatcacctcattattgttattgaattaccagtcccgcgttgcgataagctcctccgggtccgcatcctcaaagccgtatgcacgggcaatcaggtaaaaggattcgccgatagaatcccgggcaacggtttcaatctcactgcctgcttcatcaaacgcatcctgcaaatcattaaattcctctgtcgcctgctgtgtcagcacatacagcgccgccaggtcgtccggcggattgttttccagcacctcacacagacgcagaagaatctcctctccctgcttcaccagatggtccgggaaatagctgtcatcatacatatcgcctaataaacggagcttcagaacatccggattggttacaggcattttcattccccctgaaatagttacgctaagaacaaattaatacagagagacaacatataccagtttccgcgcccgccggacatacctgtttttccggccttcctgtttcccggagccccgggcagtgatatagtgccgggataaaaccggcgcactgcccggcggctgtttcccgaaccggagatgattttgaaaaaacacccagaggacgcccctttccggcagtcacccgaggataattgcagattcacttttatcgatctttttgccggcatcggcgggatccgcctgccctttcagcaacagggcggtcgttgtgtgtttacctctgagtgggataaattcgcccagcgcacctattttgccaatttcggtgagatgcctgacggcgacatcaccaggatcgcggcaaaagatattccggatcacgatattcttctcggcggttttccgtgccaggcattttcacaggcgggtgcgcgtcaggggtttaacgacacccgcggtaccatgttctttgaagtccagcgcatcatgacagagaaacggccgaaggcgtttctgctggagaacgtcaaacagctgcgtggccacgacggcggccggacattacagactatcctcgatattctgcgcggacagtatgaacagactgtgccggataatattccgctgagtgaagagacccgcagcgcgttgtcgcaaaaactgaactattgggttgatttccgtgtgctgcgtgccgccgattttggtattccgcagaaccgcgaacgtatttttattatcggttttgatcgcgaccagtttccggatgcggactttgacaccttattttcctggccggaaccgactcatcagcccacctgtctcggtgatattctccagagcaaaaaagcactggcggaagatgcggcgcgctataaaaaagatcgttttaccatctccgataaattatgggccggccatcagaaacgcaaaagagaacataaagctagaggtaacggcttcggatattgtctgtttaataaaaacagtgaatataccaataccctgagcgcccgctattacaaagacggttctgagatcctgattgaccagtcacgggacggtaaaaacccgcgcaaactcaccccgcgtgaatgtgcgaacctccagggatttccggcaaattatattaccgatgccgtttcccaggggcagatttataaacagttcggcaattctgtctgtatgactgttgtcgaagccatagctgaacaactcacagcggcattagcgcgggctggtgcattaccgccggtcaaataatcttccggcggtacggcgcatattttcccggcgaaatagggtaatctgggcttattcctgaaatcagcggctgaaaatccgatggatgtacatgacaaagaaacccgttcccggaatatgcgcgccatccgcaaccgggataccaggccggagcatcatgtcagaaagctgttgcatcataacggcttccgtttccggttatatccggcagatttgcccggcaaacccgatatatggatggcaaaatggcggacggctatctttattcacggctgtttctggcacatgcacgattgtgacaaattccggcttcccgccacacggaccgcattctggcaaaaaaaattatcagagaataaaatccgcgatgaaaaatatatcgcagaactgcaccgcatggggttacgcacattaatcatctgggaatgtgccctgaccgggaaaacaaaattatctgacccgatgctgctgacattaataaaaacctggctgataagcagtgctgtttcaggcagtattacggactccggattaactatcacgccaggctgataccttatgacacgcacccagcgcttactcaccttattacagatcctgaaagagaaccgttatccggtcacggcggattccctcgcctcgcaattacaaatcagtgtgcgttccgtttaccgggatattgaaaccctgcgctgccagggtgctgaaattaccggtgaagccggtctcggttatcagatgaaatccggattactactgccgccgatgatatttgatgtcaatgaactggaagccttaattctcgggttacgctgggtacagagtaatgcggatgatgagctgaaagcctccgctgcccgcgcggcaaataaaatcaacgctgtggtggaacatgaatcccgcgccgtattcagtgacagcacattatttgtgcccgcctcacagctgacacaggtcgataatatcattgccggggaattgcgccgcagtctgcgggaagagctgaaaatcaaactgtgttatcaggataaagaggcccagaccagcaaccggattatctggccgattgccatcggttatatgaaagaggtgcaggtgctggccgcctggtgtgaattacgtcagagctaccggcacttccggctcgacagaattcaatcctgtaaaatattaaccgataaactgccgtacccgaaaaaatacctgctcgaccgctggcgtaaaaaagtcctctgcatccctcctgacagattctgacactcccctcacctatgatggtgcctcaacacactaaacaggagagcatcatgagcggactgacactttataccaatgcaatgtcacgcgggaataccgttgatttatttctgaaaattctggatgtaccgtatcagcgcgtggaactggattatggtgcggatatgcataccccggaatatctggctatcaacccgatgggtaaagtgccggcattaaccgacggcgaccgtgttatcactgaaacagccgccatctgcatgtatcttgccgataaattcattgaaaaaggctttgcactggcggttgatgctccggaacgcggcacctattaccgctggttcctgttcaccgccggtccggttgaagccgctttcaccgccaaagaaatgggtctggttctgacagaagaagaacagaaaatgtcagggttcggctcctttgaccgcgtaatggcctgcctggaaaccggactggctgatgcggcaccgtatttatgcggtaacaccatgaccgctgttgatgtttacatcggctatttcctgatgttcctggccaaacatgacttaattgccatctctccggtcatgaaagcgtatttagacagcctgacgttaaacccggcatttgccgcggccttctccggagaataacagcaaccctccctgccataaggcggatgcaaaaatacagcatccgccatttctgcactttcttttaccgtttatccgcagtacagtttcctcattaatatctttacggtaactcaccccgcagaggaaataatgataatgagcatcctgaaaataatcgcattcccggttctgctttttatttcggtttccggttttgcacaaacggttaccgcctggggggatacattatctgacgcagaagccaaaatagcccatcaggcagaaaaagccggtagcggatatcagataaccagcgccagagtcggctgggttacttatgttacagccacactgacaccattaccggaaaatacacgcaatatttcacctgacgaaaaccaaactcagaataatgcgttaccacaaacggagaatacccgtaaccactggctgacagaaaaataaatataccggtaaatatcctttcaggatgtaactgtgacagatgcgctgcatccccgttaaataaataaaaatagcagtaaagataaaaaactgttaaacagatgcattgtaatacttactgccatcacattaccacttcattatccccttcaaaaacacgcattttaaaccactccaaaaacacaataaaacccgcattttattgttattaatctgccggtaaaaacaatattcccccggggaaaaaacacagcgataaatacggatttcaggccctgaaaagcataagaaaccggattccgctccgccacagtaaggaatgttgctgattgctatataaaaagccaataacgccgggaaaaacacgtcatacggtaaacatcagacaaatgatctgccaaatctgaaaagaaaagtgtaagtatttgtgtgaaaagtatcacacttttacgagcgcgatccggaaaacccgaaccatgattttcccttcttttcatttcagtcaaaatgacggggtacaatataacgaattgaataagatacaaaaaatagaaaacaataaacgcaatacaaggatttttacttactcagccaatatgtaaaagatcgctaaaaccgatcaataatcaattgatgatagtttttacctatcataagtgaaatatcgatcgttaataacaattttttatgttttcacatgtcttgtatatttcattaccagatggtaattatttatacgcagcagacgggtaactgcaattaatattattacatccgaatttgtaataatttattacaggatattacgatttttgttttcgcgttaattaatatttctccctgcttaatcagcaccgctgtcatataagtaaacacatcacacctgaatcctgttacggcccggggagtggaatctattatgaaaaataatcagatattactgcatgatgtaggcgcgctgatccgaaagttacgtaaagaaaaaagaatgagcggcgttgatcttggcgcagaactgggaatcagtcagcaacagatttcccgctatgaaaatgccacgagtgaaatatcggtatcaacactcattaatatacttgctgtatttaatataacacccgctgaattttttacccgtatctctgatacgaagcatgactttttcagcaaatacaccaccgggaactggtaaataccagccaattagtccgttaattattgttgttatgcatcaggaagatacatcctgtttcctgcctcacatcaataataatgataataaaaatatcttatttacataatttttatgtttttttggaaaataaaaattatgaaaaggaatgttatgaatattaatctgtttatcaggggatatcagcgatcccctcattctggctataccgccctctcactgcggggctggttagcggctgccgggcttctcagcctgagtactgcggtctgtttacagacagcacaggctgcggatatcggcagccagagcggcacaaatattacggttaatgatggtgaccggatcaccggtgacaccggggatggatccggaaaccgctatggtgtcctgaactcctataacaacggtgccggaaccatcaatctcggcaataacgtgactgtgaatgtgacagatacggacaaatacgccaaaggcgtggttattcagggaaataacagtgtattaaacgccaatggcttatccgtgaacgtaaccggtaaaagtgctatcggtgttgacctgtccggtaaaaaagcagaggccaatctgggaaccggcagcagtgtcaaagtggaaggaaccggtaacggcatggcaagcggtgtcgtggtcagcaacgcctccaccctgaccgctgaccgtctctctattgaaaccaaaggtaacagcggtacaggcctgtctatcgcagactacggcagtaaggtcaatctgggcagcggcagtacgattaaaaccaacggtaccggaagctatggtatccgtatcgacggcctgaacggcaccgcatccaatggccccgcctattttactgccactaatctgactatcgatgcacagggttcaagtgcatacggcatgaatatccagagaaactccattgttgatctgggtactgacagcaaaattatgaccaacggcgataacgcccacggtatctggagctttggtgacatcaaagcagatgccctgacaattatcgcccgcggaagcaatgccaacgcgctggaagttcgcggcggaaccgccaatatcggtgccggcagccatatgtattctgaactgggcggtggtctggtcaccaacggctcaggtacgaccatcaactttaccggtacggcggataaccgtaatactattttctccggtggttcttacggtgcgtctgctcagttttccggtgctaaaatcaacctggcaaacaccgatattacgattgaccgcaacggaagcctgggtctgggactgtgggcgctgggcggcggtgtcatgaccggtgataatatctcggtaacaggagccgcaggcacccgtggtgtctatgccatgaccaacagccagattgatctgaccggcgacctgaccattaatatggcaaccgcagatcagatagccattgccacccagcacaatgacggctatgccgccagccggattaatgcaacgggcaaaatgctgatcaacggcggtattcagtcacggggcggcctgatcaatgtggatatggcttccggctcacagtggaccgggaacgcttacagcgataacgtcaacggcggcctgctgaatgtcaccatggacaacagccgctggaatgtcacggatgattccaacctcgataatctggtactgaataataccaccgtcgatttatcgcacagattgtccgacaccggttactcaacgctgagtatcgccaacctcagcggcaacggcgcattcacgctgcggactgatattgtcggtgacggtgatggtgtcaacaacgccggtgacaaactggtggtaaccgggaccagcgccggtgattattcattaactgtattaaaccgcggcagcctggccacaaccgggaatgaaattctgaccgttgtggaaaccgcagacggcgcagccagctttacttcaacgtctgaagtcgagttaggcggttatctgtatgatgtgcgcaagaacggcaataactgggaactgtactcatcaggtgcctacgttccgccgccggtagtcccggatcctgatccggaaccagagccggaaccggaaaaaccaaaaccaccgatcaccaccacggcggatgcaggcggtaatttcctgaacgtgggttatctgattaactacgcagagacccagacactgatgcagcgcatgggtgatctgcgtcagaacggcggggataataatgcatggctgagaggcttcggcggtaaattcaactcctttgccggcggcaaaatgagcggatttgacatgacctacggcggtacacagctgggctttgataaacgtatctcaccggacacaccgctgtatatcggtacctttgcgggcttaacccagggctcaccggactatcgcggcggggacggcactgtccgctcataccatctggggctttacaccacctatatggcggacaacggtttctatgttgacggtattgccaaggtctcccgcctgaaaaacaaattcagcgtatcggacagccagaacaataatgtcagcggcgacggcagctcaacgggtgtcagtttatcagcggaagcaggccggaagttcagcctgagccgggccggtaatggattctatatcgaacctcaggcgcaactgacctacagccatcaggattcaaccggtattcacgccagcaacggcctgaaaatcgacctcggcagctatgattccaccatcggacgcgccggtacactgatcggctatgaaaccaccaccggtgacagccagatcaacgtttacctgaaaaccggttttgtcagagagtttcagggcaacaccgactataaactgaacggctcccgcgaagcacacagcttcaaaggaaactggtggaacaacggactgggcatcagcgccaacatcagcaaaaaacataccctgtatgcagaggctgacagctcaaccggcaaccggtttgatcagtaccagatcaacggcggataccgtttcagcttttaatctgtgagatgctgtaagtaaaaagacgaagagggatcttcgtcttttttgttttcaggaaagtctggtttacagcagatatcaatgcggtaaatataatcaatattctattgaaattattataatttttgtaacagtgaacacgctgaatatattgaaaattttcaatttttgagtatgttaaggatgacaacgggataataatcatcagggatgaaacgatattggtcgatgctattttttctgtctataaatacattgatatcacagtgatttttatcgcctccctgctcatcctctggctttcatccatctcatctgaccggcttttacgtattatattgtttctgttatcactcctgttaatcacaccctatatttttatggctgcttatgtggcgcttatactttcggtgagtttgatgtttgtgtgagtatgagtataaccggacaaaaacatcagtcttttcctcctattaacgtgacactctccattgaaattcaccggttttacgagcatgatcgcagttatataaatatgttacccggttcattcttattatgatatctcccgaaacactgcaatccgccatcgccagcatttcagtgtggcgccagggtgacgtatgcgcaccccataagccattgctgttgctgtatgtgctttcgcagtataaggcggggcatccgcgcctgttcaattatggccgagaaatccacgaaccactgacccgcctgctgagagagtttggacccaagcgacgcactgattaccctaatatgcctttctggcgtctcagaagtgacggtttctgggaaattactgatgcagaaggttgtaaacaccgccggggtaacacgcagccgacaaagaaagagttgattgataatcacgtatcaggcggttttgatgaagccgcttaccggcaattacgtgaacacccggaattaattgataaactggcccagcaaattctgacaaaccgttttccggaaagtattcagcggatccttgccaaccaacttggcctggattttgttgaccggacaaaaaaccgcgacccgcatttcagagacatcatactgcgcgcctatcactcccgctgcgctttctgcggctatgacctccgcctggatggtgcgctggtgggtattgaagccgcgcatatccattggaaagcctacggcggcccgtgtgtggtacacaatggcctggcattgtgttctcttcaccacgatgcatttgatatgggcgcattcggattagatgaagatctgactatccgcatttccgccggtgtcagccgcagcccagtcatcgacaatctgttctggcagcgaaacggccagttattgcaccttcctcatgatgaatccttatggccggcagaacaatacatcggctggcatcgtaagcaggtgtttaaggtgtgaggaaataatatgatcactggggtagaccagtccaatgaggccaaaaagtatctacgaaacacgggtctattcaaagtacaatgaatgtactataacattatataatgtggaattttgagcttacaaaaaaatgaatcttgccgacgaagaattgttagaagtcgcgtggtatttgtcaaaatatgggtataaaaagcccccaatagcgctgggagttgagaaatggaaagatgctgttgcactattttaccctcgatttggggcgggtaaatcattcacagagttttataatagtttaaaaaatcatcgtgatcactacgatgcttggatgagcaatatacgcattggctggcgcaacgacgatggatcaccacgagatcttccctctacatcacaaagagtgttgcagaggatgagtttgttgtctgatgctcaaattgaacacaagattctaagtaagctgactgatataactgatattcaagaaaaatacgatattgaattaatcgttaaagatcaatcaattgatgagactacaaaagaacgcctgattgcggctagacttggccagggaatttttagacagagatgtttaaaacttttcccagcttgtgctgtgacaggatatacattccctccattacttcgggcaagccatatcaagccttggtctgcatgtgaaagtgccaaggaacgtcttgatccttacaatggtattgtactagctgcacatatcgatgctcttttcgataaaggttggatttcattcagtaatgacggttacattttactcagcaaagagcttgatgaaactatcgtaaaacaactttctttagccggtcgaaaaattaaaaaatttccttcactttcacacgattaccttgagtggcatagagaaaatctattaagataaacaacttaaggtacgcgatgtagatatagcgattcaccgcctatcagatacctaacccgtaccttcataaacattgctaaggaatagctttgttcgggtttgatctcttccctttcttcagtaccggtgtaaagtagagtttccggcctttcttctcctgaaaaaaagaggtcatctgacatgaaaaagacacgttataccgaagaacagatcgcatttgccctgaaacaggctgaaaccggtacccgggtagaggaagtgtgcagaaagatgggtatttctgaagccactttttacaattggaagaaaaaattcggtggtatgggtgtgacggaacttcgccgcctgaaacagctcgaggaagaaaatcagcgtctgaagcgcctggtggcagatctgagtctggacaaagagatgctgcaggaggtcatcaaaaaaaagttctgagaccggcccagaagcgggaagcggtaacctggctgctggaggcctaccgtatcgggctgcggcgtggttgccgtctgatgatgcagagccgcacggtctaccactatcaaagccggcgtgacgaccgagcagtcacgcagcggataagggaaatagcggaaacccgcgtccgttacggtgtgcagcgtatacatatcctgctgcgccgggaaggctggctgattaaccataagaaaacccaccgtatttattgtcaggaagggctgaatctgcggacaaagcggccccggcgacatgtcacagccaggcacagacaggagcgtccggcagtgacggcagccgatcagtgctggagtatggatttcgttgctgataatctgttcaacgggcgccggatccggtcgctgactgtagtcgataattttagtcgtgaatgtctggcgatagaagttggacagggtctgcggggtgacgatgtggttacggtaatggcgcgtctgaagcagttacagcaccgcgttccggaacggtttcagaccgacaacggcagcgaatttatctcaaaggcgctggataaatgggcatatgaaaacggggtaacgatggacttctcccggcccggaaaaccgacggacaatgcgttaatcgaatcctttaatggtagtttccgtgacgagtgtctgaacgttcactggttcttgtcgctggaagatgcgcaggaaaagatcgagtgctggcggcaggaatataaccggcaaagaccccattcctcattaaataaccagactccggaggaattcatccgaagtctgcaaaaaggtccggatctctgatttaacctggcgctgattttgggaagagatcaaaaaggtccggatctctgatttaacctggcgctgattttgggaagagatcagcgaaattacattacctaagactgaaaagaactaaaagaggcaattcatgtataaagtcgataaacaggaaaacaccttacactctttacaagaagtgtctttcagtagcttaggtttccgtgagcgtgaacatctacaagaatggttagctaaaaatccgcaagcattaactaaaaaagaagaagttaacgatgaactgttaattatacaaaaagaatttgcgggatttgatgaaactaaagagcgtttagatctacttgcattagataaagatggtaatttggtgatcattgaaaataagcttgatgattcaggccgtgatgtggtgtggcaatcactaaaatatgcggggtattgtgctaatttacgtcaagaaagtatcattgacatatttcagcgctatctcaaccagtatgaaccaaatgaaacacgctcagcatctgaaatcattattgaatttattggacgtgaagttgtacttaaccgcaaaggtacacaacgcgtcatcatggtagcagcacactttcgcaaagaagtgactaataccgcattatggctgatgcaatttaatattcgtattcaatgttttaaagtaaccccttattgctttggtaacgatgtctttatcgatattcgacaagttatcccaactcctgaagccgaatcgttcatgatcggcatggcacaaaaagaagcagaagaacaatcgtccggtaatgaccttcagcagcgccactacttacgacgtgagttttggactttggcattagaagagtttcgtcgcagtcgctgcgacctttttaataatcgctcaccatcaacagatcattggttagcggcgggatcaggtctcagtggagtaccttatgagctgattttttcgcaaaaagatgctcgagtacaactcaatctttcccgagctgatgcccaagaaaacacatggctatttgaacatttactcgaacaaaaatcacaaattgagcatacctttggtcatacattagaatggaggccattaccagaacgaaaaagttgccaaatagttttccttcaatcttttgatggcatggataaagaacaatggccaaccatcataaattggatgattgaaaatatgtctaaattagaacttgctttaaggcagcctcttgcagaactttcgattcagcttaaacagagtggcctaatcacagaaggtgaagaagagtaaatcttaggtgagaaggatttagacaaattaggttttgctagtttttggagtaaaaacggaggaatatcacctcccctaatcttcaatcattccgagcacaaaaagctaacagcagttcgttaatataatacgtatgccctcatagtctagccaatctctgcttagtaaccaacaatgaaacttattggtttagacataataataaaacatcatagcatccgtttatctggtcagcggagttaatattgattacgcagaagatgacaaggatattttgactgctatcaggttttagccagacaaagcatcataggcagataatcaggtaaaatattcaccagaacaaagcctgattttttcgcgtcgttagacagaactaaaccgtaaaaatacccgctaatattttaaaaatagccatgcacgcctacggtgcatggttttgcatttaaatattcgaatttttcacaccccgtcacaccagcactggcgtggcctgagcgcctccacgcagctgcattaaaaccgatacataaagcgggcaggcgaggagggggaagcattgcgcgccagaagtaaaatcattttttttgcagtgtagcctcaaatccagatttcaaatcttgaaaggacacaatgattatattgataaactctttattgttatcgttcaggatagaatcaacaaaatcatttaatgctgaatattgactcaacacgttgacgtctataaattccttgtaggtcatacacccaccgttaatattgagactatcgccaatgtactgctgttcaagagatcgaatacaaggcaaaccgagtgtattctctcgtaaagtgattgaaatatttttaattagctcggtaataagcatctcatcatttgttggggaaaaaacagaagagtctctattctttctaaaaagttgagcccagaaaaggtactgacacaaatagaattttgtgctatcaataatatattgatctgatgaaagtcccctctgttctttgatataacacaatcgacctaaaaaaccattcgcagcactaagtaaagttagtccccaacgaccaatctcaagatcccttgtcttccgaatatcataattacgttcttcttcctttatctttatatcactttcatatttcagtttatttttaaaggattccaattctcttttatcaatatgttttaaaaatattttacagacaaagccaatgacagctaaagaaatgctagatgacagaagcccttcccaaaaagtactcattttccaccccgagctaaaagttcgtcataatcaaatcctggaggattatctttgatataatccgaatctatcctaaatgagcgatattgagcctcacgtaacgcatagatatttaacgtagctgttaaaatacaatgattctctccacctttaacatatattttattggaaattgtactactagtaggctgaagaacacacgaaccaccataatgtgatgtatttgattgcgcaacatagcagtgtaaatctctagcggctgattcagtgatatgttgataataattaatatctttgttccatacgctagcaaataatatatcaagctttgagcggaaaagtgcccgatgttcaatgtttgctaactcaaaacagttatacgttgaaaacgatatatttttccattttattaaatgatatttttgctcatcaggaacaggagacgaaacacccagcctcaatgatgtcagcatcttaatttcacttggtgcatagtgatttttaactctgaatgtcaacatactgaacttatgcttaaaatgggaagtataaggtaacatctcaaccaaaatattattcgcacgatcattcaccacccagtgctcaagaccaaatattaaagcaacttgctttcttcttgaatgtgcagccataaatggcaaccaagaaacaggtatcgataactcaggaagaagtaatatttgaaccttctcatcagtagcggaattaagaatacgataaagatttttctgtcgctcatagcttaaatttggcgactgatcttttctacatgcactctcaatatctttgtattcgaccttcatatttgcaagagcaatttttattgtgtcattatgtttagcatcgtcaacatcgatcgttatctccagtgctttattgtcttttatactttctacagagcaacttttctcatgatatttattttcctctgtaaagtcattcaaagtattggtatgcaaagcatcgattaattcaaatagttgttcttcatcagcatggatatatcttggggttttattaatctttctttttgacagtgaaacgccatgtaatttactatataaattttcttctgtaagatcaccttcataattggtgtaattagctaaaggccaagaaactagattatggcgaatcatattacttctcctaaatctgtttatcatcaagggcatttcatcatgctgatttattaaatcccacaatccttccaaacttctatttcgtggttttcatccccaagcaaaacatctaaatctagcaatgcgagatttaagcacagtgaaatgtctatatatttctgaattccctgctttaacttatcagctaccaaaccactaacttcattatttctatcacttacattaccatcatcttttctataccatttgaccttgcgtattaattcaataacttgcttataaaacattattgaaaagccatatctccttgtaattaaggtatatgaaagaaccttctcccacaatcgacaaaaccttaatccattttcacctttaaagaataatgtaatttgctttaaggtatgttcgttagaaggtaaattacataatctatgagctaaaatatgagaggatatatatttagaaagctctgtttcattttccgccagaccaactatactcctgaacttattaacagaaccatcaaatagaatatcatatgcaaacttatctagatcacttgaaatatgctcttctggcaaaaagcgaaaagcactacttctattttcaatttcttgcttaaaaacctgcaatccagcaaggctatgatctttattaaaataatgaaagataagcttatctttttgaatgggtaactcatgatactctgacgtcaatttgaagcctttatgatcgtcagtaggaattataaagtcgcttaaacttctgttaataaaattaacaacctcattacctctatcttctatttcaattttaggcgaagaaaaaacaaacaaaatatcatctacatagcggccatagtaagaaggattaatcttagatttaatatctctatcaaaattagccagataccaattagccaatatcgcggaggatgtaaaaccaattggaatcccctttgaagctgattccggatgagtttcctctataaaaggagatattttatttctatatttttcatgcattaactttaattttttattaagaaataatgatagttcttttatttcttcaagctgatgctcttctattaatgcatcaatagcatcaaagtcaacataaatattgtaataaaagcctttgagatcaagtgataatattgcaacatcattgcgatctttttctataacttcaatagctttattaatcccaccatctctccatctattatagttatcaatgtatctttcaaaaatatttttagcttttatttttttgctatcatcattttccttagagtatttctttattgatttagagatcctatttccgtaaactgattccgaaaaattatcatcaagcatagatccaacaaaaatagaccataatgtatcgataatatatatttccatcggagcagttattaaatagttcactgcacaaactttataatcatctgctgttttattattacttaagaagagggctccgcttctttgttcaaaatctaaatgactatcaattttctttggcaaaagttcaacatcgattttatcgagccattttctgaaatctgtattatcgctttcaaaaaattcaactattcgttttacttttgataaaaacttggtactttcaaagcgagctacttctgcttttaaaaagaaattaaaattttcataataagcatatgacttaagacaattatatgcactgataactatatttttagtaatcattaattattattcctttgcttaggataatttaggtcaaatcaagaaagcatcatcaatattactgataggagttaaggtatttaactttttttgcaaattcatatggagtgattaaagcatgagtattttcgaaaagaaagtcagcccaccactgcaccatcaagcgcctttcctcaatatgttctgctttatgaatataagcagctcttactgaattacgctcttggtggctcatttgcctttctaccgcatccttcgaccacagccctgattcaatcaacgagctacatgccattgttctgaaaccatgaccacacacttccgttttagtgtcataacccatcactcgtaatgcgttgttaaccgtgttctcactcattggttttctaggattatgatcgccgataaagatcagctcgtggttaccgctgaattgatagatctgttttaagatctcaatggcttgccggcttaaaggtactaggtgaggagtacgcatttttgatccgcgatgagagtgtttaaccccttctatcgcctcacgctcagctgggatcgtccacatggcattctcaaaatcgatttcatcccaacgggcaaaacgcagttcactggaacgaataaagactaataaggtaagtttgactgcaagtttagttaaaggtcttcccttataatcatcaatgcgttgtaagaactcaggtaagcgtttaagttctaaggctgctctgtggactcgtttacctgtcgcaactgcaccagccatatcttgtgctgggttatagtcgattaaaccgctttgtacggcatagcgcattatacctgtcacacgttgctgtaaacgtgccgccaccccaagacgtccagacatctctacggctttaatgggttcaaggagatcacgagtttttaactcagcaatattacgcttatcaatagcagcaaagatattgtcttcaaggctctttagcacgcgatggctatgtccttctgaccacttcttattcgttgcatgccagtcacgagcaaccttctcaaatgtattaaattctttctgttgctcttctttaacttctttgcgtttttcactgggatcaaaaccattcgcaattaactttctagctgcatctcttttttctctcgcttctgcgagtgagatatcggggtaaacgcccaacgctaacattttttgcttaccgccaaagcgatactgcaagcgccaatattttgagccgttggtatgtaccattaagtgcataccatcaccatcggtcaatttatacgatttatccaaaggcttggcagccctgactttagcatcagtaagagccatgatttatctccttctgttggtacaaactattatcgaatcgagagataccaaacacatataccaacagcaggtacttgatgtgggttgaccttagtatacttgggaagactgaaaagtggggaaaagccttgtaaaactgggatttcagatacaaaaaaagacgtccattgacgtctcttgatgttcttatggtgcgaaggccggactcgtacataatacttaacctcatgatctaaattaaaatattaaagtataaatttatttataccaacgcatgtaccaacagatgaaattcttactttttttgatggttatctaatataggtaattgtgatactgatgaaataatataatcttataagctatcttcatgcagcatcaagatctggtatcgtcgctcctcggttagcctcatagggtcaatcaccacctccttaggaggctgtcttttatgtttaagacgctaacgcgactaaaactggctaaagccataataaaagaccactcccttcggaagtggtttaaacttgacgatgaaagaatggagactaatgaacatgtatccacatttatcgattttgtttctctcgctccatttcttctaatgtctctttttgaatacgtccatatttttgaatatcctcataagctttcatgttagtttgtaacccgccttgcattctatttttctctttccaacgagggcgatttttacctgaaaattctttcttctggctccaataaccgatggggtactgagccacaatcgttcctccgacaccaatgtccaccgtagagtattgaccattgttgatgtagccctttttaatataagcatttggactacacgtgccggtatctcgttgttgccaaaaaccttcagttctcgctacgatataaaaatcaccaaatgcacacccagaggcagattttcggttcagtacggcaacataatgtttggttgaacccactattttacaggtactgttttggctgccacagacttgccataaagttttacctccatcacctttatattcccaaattgtatctttaggcggcttgctggcggcaaaagcttgcgaagcgataagacataatgatgcggatgtaataagagctaaatattttttcatttaaaattcctttcaatattattagatacgtcaatattgacgcaagataagcacaacttaataggtgctcagttttctaaggtgtagcgtattaagtgttcaattcatgaatagctgaatgtttctttaccgtgaaattgcagtctctccttaatctcactggagatagtgttttgatttttaatcggcgttatccattcaaaattgcaatcgcggcacatccagcccgtaccccatgcaatgatgtcttgctcagaagaacagtgagggcaatgtgtgggatacgatgttagtggggttaataacgtcatggtcggctcctttctttgtgtgatggaagagaggtaactacttgtgatatcaatcgaaaatgcggtaaggccgcgataaaattgttttgttgtgacagttgcatcactacgtgtttcggtgtgaagggggtattaagtggttgaacttgctggatatcctctaacagtaaaacatgcacttgctgatggtattcagccaataaataccactggccttcacggtaaatcagttgataaggttgtagtggattaaatcgacgctcaggtgtaagtaagctaatagattgcttactggtaatggcatacaccaattgatagaaatggtcagcatgcaaagccgaaatcttatgggcgtgatgccaaatcaaacaaggtgcatgaggctgctgggttaacagtaacccgagtaagcggctgtctagccctggaaacaaccgagtcattccaatctgtttcacaaaggtaagaacatctttgtctcggtaagcttttagcgtattgatgggcaagcgataacaaccttgccgaccttctacacccagataagccaagcgttcacgtaaatcccgttgtaacgtgcgctcagaaacattgaattcttggactaaatgcgaaagcacaaggctttctcctgccattaagcgggcaatcaacgcagagagtcgcacagccatgcggtcatattttcggttggtctgaaacataacgtattgctctcaataacagacgttaggaaattaaaaagtaagggagtttaacttaagggattgacaggttatgtctgttgggaaaaattctcattaggctttttagtgaaaaatcactataagtaattcattgataaatagcgttatgctttttatttgagcaataagaaagtaaggcgtaacgacacaacctgtcagggcgggaaaattagttgggttggcgagaggcgagttggttaaataaggtatcagccatcacccacaaggctttattgagtttgatatcgccatcaatcccattaactgaacgagtgcgagcgcgtttaccttttgcagtactgcctgataatccccctttaatcagattttcttgtaaacgttggtacaccgtccaaaggtcttctttcttatcttcaaagcgtcgaggctgtagaacttgctctcgtgtgacgggctggaactcttcaccaaagcggtaggtcaacgccgcttccgcgaaggcgtgctggacgggtgaaggtaacaataacgactgcatactttcgcgtttttcagccacgtgctcaaacgtatcgagtacctcatacgccccttcaatcactttctccacgacatcccctttatgaggtacacgcacttcacctaatacatcaccacacaccaaaccgttagaacacacagctctaaagagtcccggcaacatctggtagctgctcgaaccgtcatggctattgagcaaaataatttcagggacttgtacgcccgtgatttggtcatgtctccgaagtcgtaacatgtgctttgtatgctctcggcggctgatatcacgcacccgagtctggcaggcaaagaacggatagaagccttctttttgcaggctgtctaacaaggtaatggtgggaatgtaagtataacgttcactgcgagaatcgtgtttttcttcagaaaatacacttggtacagtacggaataattcttcgatggtgagtggacggtcacgacggatactatttgctgaaccaaaacgagaggctaataaactcatgatagactcctgattaatcaattaagtggaaaatggcattggattcggaatgttgtgaagcgtagtcgcgcagctgataaaagcgctcgcacatcacttcgctttccgtttggaatgaccagatgctgtacaggatcagacacacagcaatccctgccgcttcttgactcatagtggcttcattgcagttgtgcatgttaaataacgttaaggtatccatgttgatatcagggtagataaaggctcccccattgctgagcacgccgtactcccagtaaccgccatgatactcatcacagaattgccccatcgtggtgaagatcaccacttcaaaggtgacccagccttttactgcaccaaaatggttgaaccaaaaatcaaggcgttgttcatcagggactaattccattgtgatagcggatttagttgaatgattcataaattggaactccaataaaaagagataaaaaagcgccaaccccgttaaggactggcgctgagagtgataaagaatgggttaacgtaagaggttaaaaaagcaggctccacagggatttagcgacggagacgatgctgtttttgaccgtgctgatcgtatgttttatcaatgggggtaatggaatgatatcgattattgtatcgatgatatcactgacacattgcccaaaatcgttacgtgccgaattttccacagattgcgtccggtaagtgctgttcagttgcctagctaccccgctactggcttgcgccggtaacgcctgtattaattgctcagctaattcagtgagttgaaaaccttctgccgcagagactgtcatcacagggtggtgcggcttgaatactgttatcacggcttgctgcttcaattctaagttagccacttgttcaagggatggctggttgttgtgttcatcccactggcggcagggctctattttgtcagcctgattcaatacaaacagaaatcgttcagattggtagccacattgctcagtaagaaagcgataacactgttcatcagaagaccatgccctatcatcggctttgagtacccagatgattaaatccagttctggtaataagttacgatatagctggtggtactctttatctcgctcaaggctttcccccacaccgggtaaatcaataaaggtgagtgtgtggttgtttatggtcatattgaagagctgggcttgccgtgtgcagccagagacattactgacgggcgatagggcagattggaatagggcgttgattaagctggattttccagcccctgttttacccatcagaccgatggtgggggaatagttgatgagtttattcaaatgggataaaaacacatccttagcccctttagggaggaaaagaaaatgattctcgagtttattcatcgttgcaaccttaatatatgttaagttcgcatagatgatatatatttgaaatttatttcattttttcatattcatcaataatgaagctattcaaccattccgacgcgggtacaccataattaagggctaactctgtcaatttagttcttgcctctgctgaaagttgaatatctttcggtgatttttttggccttaccgaaccttttgattggctagttgttctgtgttttcgctcatttcgagctaggagtaattttttataacgattatctctttcctcttggggtggttgccataaataaaaaccagtcacaatgtaaagatacagctcttcattatcttgatattgagttttatctattactctgctcttgattaggtagttatagacccactcgcaagttttactatcagacgcttttaaccaatcaaaatatctgtaacggcaggtctttttgattaagtcatttctcaaatagtcaagcattctataaatatcagtaacataatccgtgtagttataagcattaagttttgtaacaacaaagttaatatattcgatactttcaacatatcgcccttcatggctcttcggctcaaaaagaaatttcttgtcgaaaaaatcattcgttactgtttttataacacgactaaaatcgtacttaaccgtgagatcttttaaatagtttcgtgttttaaacatataaaaattaacgtctttgctattgctcaacacacgccatatgaggtaacaaaaaactttattctttctcatataaccataaatttcgttctctatatatgaataattcatcgtcatgaaagcctcatttttttatcgattaaaacatgataattattttattttacgataataaaatactattgaaactaccaatatatagctaattaaaatacattttttttcatgatttaatcgtgatattcatactttatcattcctcatctttaaagggttatgtatagattattaggcttatactagtacaataatgttgtatttattgataagcatactaaaaaaataattctaatgttgtgaaagtgacgctgttatccatttttcgttagaaaattaatatcagagtacttcttgatgagatgagtcactgagcctctgactaacaggacttccgtgtgtaaaaacggtgctggtatagttatatatttagtagggtaagaatggcattttatagacctaaagatcactcaagcaatcttgactaacttatctattttttacatccatcgaactagatatgacttaaaaaccttaaggaataaatcatgtctagttatacctacaatgaggactatcttcgtaagatagatagcactatccgtaaatcactcctcaccaataatcgtgtcacagctattcgcgtcgatttacgcttcccatcatcgacaacttgttaccatgaggactcaacagtcataactcgcttcattgaatccctgaaagccaaaatagatgctgatctaaaacgcaaaaataaagtatgggatcgtaattattcatgccccttatcttatgtttgggtcagagagtttggtgagatcagttgtcggaaacattatcacttattgctgctagtcaataaggacgtctattggagtttaggtgattacactagaacggaaggaacgctttatgcattaatacaacaagcatggtgtagtgcaattggtgttaactactctgcggagcgttatttagttcatatcccagacaatgcagttacttggctagataacaataatgccaacaatgaaagtacgatattcgaattaaaccaacgctgtcgttacttagccaaagaacatacaaaatattatggtgatggtgagcgttctttcggatgcagccgttaatctaccaataaaaaacatgagagggatatcttttagaagagagatatccctaaacatttatcgatatcccttctgcctttaactttaaagacaggagttcaataatgagcactcaagcgattcccttattagatgaccaatgcgttgatatgaaatttataacccgtttaactggattaactgataaatggttttataaattgatacaagatggagagtttccaaaaccgataaaactggggcgtagctctcgctggttaaagagcgaagtcgagaattggctacaggcacgtattaccgaatccagagcttaaccatcacatcacttccctattctttgttagcaacaccaacatttaaatcacaccggaacttcaaaaatgaacaagtaccatgtctgtcatgagacattgttacgcaaatactagagctggctggatagcttaggcctaggctgagatctggcagctgcagaaagagccgaagcaggttgctcaacagcgtgttcagtgtagtcctgataaaggctatgggtagtgatactaagaagtattaccaactccggaaatagaatgaccgcgatcaataacctattatgagtgctttaatttttagttcttcgggataacgcttacctctcatgccctctctcttaagccatctataaatgactcttaagtgtctattaaatcggtgacgatctagccctatatttgaataaattaggctcaaatatgtgaacttagcacgtcagtaatatgtttaaactctttttgttatgttttaaccgcgttaaactatattttatattagtttattacatagattacggcataaatggagtcttacgtggaagatagatggttatccgttgatgagattgcagactatctcggaataaagcgtgacacagtctacaagtggattgctgagaaaggtatgcctgctcacaaaataggacgcctttggaagtttaaaaaggatgaagtcgatggctgggtacgcgaaggcaaagctggcgaaagcaatgactaaaaataaagaacatataggagtggataaatgaaaacagttcgtaatgcctgccagttgcaaccgaaagctttagagataaatgttggcgatcaaattgaacagcttgaccaaattatcaatgatactaatggacatgagtattttaaaaagacttttattacagacggatttaaaactcttctctcaaaagggattgcacgtctagctggtaagtctaacgatacagtgtttcatctcaagcaggctatgggtggcggtaaaacgcacttgatggttggctttggtttgcttgcaaaggattcatctctcagaaacgcccatatcggagcgatgccgtaccaatcagattttacttcatcaaaaattgcagcattcaatggacgaaataacccccacacttatttttggggggagattgctcgccagctaggtagagaaagtgtatttaaagaatattgggaatcaggtgccaaagctccagatgaacaagcatgggtaactttatttgagggggatgagccgattcttattcttattgatgaaatgcctccttattttcattactacagcactcaggtgcttggtcaaggaactattgcagacgtcgtaacacgtgcattttcaaacatgctaacagctgcgcaaaagaaaaagaacgtatgtatcgtagtgtcggatttggaggctgcatacgatactggtggcaagctgattcaacgagctttagatgatgctacacaagagcttgggcgtgcagaagtttcaattacgcctgtaaatctggaatcaaatgaaatttatgaaattctaaggaagcgcttgtttttagctctgcctgataaaagtgaaatttctgagatcgcctctgtttacgcaacaagacttgctgaggcagctaaagccaaaactgttgaacgaagtgctgaggctttagcaaatgacattgaatcaacatatcctttccatcctagcttcaaaagcatagttgcgctcttcaaagagaatgaaaaattcaaacaaacgcgcggtttgatggagttagtttcccgattgctgaaatccgtttgggaaagcgatgaggaagtatatttaatcggcgctcaacattttgatctttcaatccacgatgttagagaaaaattggctgaaatatcagagatgcgggatgttatcgcacgcgatctttgggattcaaccgatagtgcacatgcacaaattattgatttaaatagcggcaaccactatgccaagcaagtgggtacaattttgctaacggcaagcctatcaacagctgttaattcggttaaaggtttaactgagagcgaaatgcttgagtgcttgattgatcctaatcatcaagggagcgattacagagctgcatttgcagaattagccaagtcagcatggtatctacatcaaactcaagaaggccgaaattattttagccatcaagaaaacctaaccaagaagcttcaaggttatgcagataaagccccagagaataaagtccgggagttgattagtttccgcctcgaagaaatgtaccgcccagttacaaaagaggcttacgataaagtgctgccacttccagaaatggatgatgcagaagcagcattgaagtcctcaagagcactattaatcataagtccagatggaaaaaatccacctggggttgtagcaaatttctttagaagcttgattaataaaaacaatattcttgttttaactggtgataagtcatcaattgcaagtattgaaaaagcagcacggcatgtttatgcagttacaaaggccgataacgaaatttcaacctctcatcctcaacgcaaagagcttgatgaaaagaaagctcagtatgagcaggactttcaaactacagttcttacagttttcgataaagtattgttccctggcaatggtggtgggcaagatttgctgcgttccaaggcgttagatagcacctacccatcaaatgagtcttacaatggtgagcgacaaataatcaagacgttgacgtcagatccaatcaagctatatacgcaaatcacagaaaactttgatgcgttgagagcaagatctgagtcgttgttatttggatctcaggatgaagctcgtaaaaccgatttgctcgataaaatgaagcaaaagacacagatgccatggctacctagcaaaggttttgagcaactttcaatagaagcttatcagagaggtgtttgggaagatcttggaaatggatatatcaccaaaaagcctaagccaaaaacaacagaagtgattgtaagtgaggactcatcacctgatgattctggaactgtacgtttgaagatcgatgttgccaatgcaggtaacagcccacggatacattatgcagaggatagtgaagtttcagaaaacagtcccgttttaggggaaaatattcttgcaaccaaagctctgcgtgttcaatttcttgccgttgatccaactggaaaaaatctgacagggactcctacgacatggaaaaatcgactaaccattcgcaatcggtttgatgaaattgctagaacagtagagttgtttgtagccccaaaaggaaacataaagttcacccttgatggctcagaagccagaaatggtgagtcatacaatgaacctattcagttatccgatcaggaaactacagtttatgtttttgctgaatgtgacggattagaagagaagcgtaacttcacttttgcggaatcaggttccaaagagatccccattgtaaaagacaagcccgcgatcttagtgagcccctctccaaaacgaatggacagctcaaccaaaacctatgaaggcctaaaaattgcgcaggaaaagggcatagagtttgagcaagtaagtctaatggttgggtctgctccacaagtgattcatttatctttgggtgagatgaaaataagcgctcaatttgttgaaacggctttggctcatttgcaaagtattcttagtcctgaagcacctgtagtgatgacttttaagaaagcatatacaaaaacaggccatgatttggagcaatttgccaagcaattaggaattgaaattggaaccggtgaggtcgagcaacgatgagtaaaacagttgacttcggtgcaccgcctgattttggcatgcatcacttttatgtcgagatccccgccgctcctcgtgatgcagttgttatttacgaggactatggcttcgatggtgacgaatctcgtcgtgagaccgtagagcgacgtcttattttggcaagagagttatggaccaaaattcgtgacgatgcacgcagggacttcaatagtcgcttaaaagttaaaaagcagagcgctggctcttggtctacagggcgagttaagttggatagatttttaggacgcgaattgtgtgtacttggttgggctgcggaacacgcaacgccagacgagtgctcagtaatttgtcaaaaatggcttgctatgcgtccagaagaacgttggtggctttatagtaagactgccgctgaagccggaaagcacgaccaaactcaaaagggttggcgtaaggctctttactgcgctctttcagacggtagcaatatcaagttagacgttaaaaaaaagcctaaaaccaaaaaaaacaagcatgatgacgaaccacaaggtctcttcgacttcatggaaaaaggagatatttaatggcattacaaccttacgaatggaaggataaaccagctcttattgagcgcctttttccagttcagaaaatttcggcagagagctacaaagagcaaatggctggctcaggtaaaacgttgacagcattaggtagttattggaaggggcgaaagcctctaatattaaataaggcttgtatacttggtgcattactacctgccacagaagatgcacttaaagacttggaaatatttgagcttctcatgggtatggattccagcgcaatgcagaagcgtatagaggagaatctacctacgtctaagcacgatcaaattggtgattacctggtgcttccatacaatgaacaagtaagactggggaaaaggccagaggaaatcggcgatagtttgttttctcttgtgtggatacgtgttaacgaacatcttggaacaacggctaagtcgattcctgaattagttgaacaaattggtattgcaagatatggacgtagaccaaaggttgctgatgttttctccggttcagggcaaataccattcgaagcagcaagattaggatgtgatgtttatgcttcagatttaaatccggtagcttgtatgctgacttggggggggtttaatatcgtcggagcatcttctgaaaagaaaatagagatttacaagagccaacaaaaacttataaatgaagttcaaaaggaaattgatgatcttgatgttgagagtgatggatttggctggaaagcgaaagcatttctctactgtgccgaagtgagatgtcctgaatctggctggctagtgccagtaataccaagttttatagtaagccagcctagaaatggggttaaaaataacgtcggtttaaaattaaaaccattggaagatgagaaacgttatcatattgaggtcgttcagtgggtaccagacgatgaaatttcagattataaagatggaacaatcaaaaatggtgagttagtacattcaccagatggagttaatacttatagaattaaaataacttctataaggggtgattataaggacgggaaagtcaataaaaatcgccttagaatctgggataaaagtgattttattcctcaagctgatgatatttttcaagagcgactatattgcattcaatggataaggaaaaagaaaagcggaaaaggcgatgagtatgaatttaggtctgtgactaaagaagatttgattcgtgagaagaaagtaattgaattcgtttcagaaaatttgagcttatggcaagaaaaaggttatgtccctgatatggtaatagaaagggggtataacactgaccagccaattagagaaagaggatggtcttattggcatcatctattcaatcctagacaaattttagttgcggctttagttagaaaaaaagttacggaatatacgtcgtttggattttcacagttaattaattggaatagcaggctttgtcgttggaatattgccagtggtggtggtggcagtattcaggatactttttataaccaagcgcttaatactctttataactacggttgtagaagctctaaattggcattatctcagttgaatatttcttatagagatacagactttgctgaagattgttctcttacgataaagacacatcctgcacaaaatatcgagctagaaaacgatatttatataacagatccaccatatggtgatgctgtaaaatatgaagaaataactgagtttttcataggctggctaagaaaaaatccaccaaatgagttttctcagtggacatgggatagtcggcgctctctagctataaaaggggaagatgaaggttttcgccaaggtatggtttcggcatatcgaaaaatgggtgaaatgatgcccgcaaatggtattcaaatcttgatgttcactcatcagagcgggagtatttggggtgatatagcgaacattgtttgggctagcggccttcaagtaacagctgcgtggtatgttgttactgaaacggattcaaccttgagagacggtgcgtatgtcacgggtacaatcatgcttgtactgagaaagcgcaatgataatctagaaacatttcgcgacgaccttggttgggagattgaggaagcagtaaagcaacaagttgaaggattaacagggcttgatcaatcaattcgaagtcaaggctccgaaggactttataatgatgctgatttacagatggccggttatgctgctgctttgaaagtactaacggcatactctcgaatcgacggtaaagatatggtgactgaagccgaggcaccacgacaaaaaggcaaaaagacttttgtcgatgagctgattgactttgctgtacaaacggctgttcagttcttggtgcctgttggctttgagaaaggcgaatggcaaaagcttcaagcggttgagcgcttttatttgaaaatggccgaaatggagcaccagggtgcaaagactttagataactatcaaaactttgctaaggcgttcaaggtgcaccattttgatcaattaatgagtgacgcctcaaaggccaactctgcacgattaaagctgtctgttgagtttaaaagttccatgatgtcaggagatgctgagatggccggcactccgttgagagctttactatatgcgttatatgagctttcgagagatgttgaggttgatgatgtgttgttgcacctaatggacaactgcccaaattatcttcctaataaacaaatgctggcaaaaatggccgattacattgcagaaaaacgcgaaggattgaaaggtactaaaacttttactcctgaacttgaagcgagctgtgcccgtgttcttgctgaagcaattcgaaatcaaaggttgtaatgtatggcgattcggcgattttcatcacgcacagaaaggttggataaggaatttttagctgaatcgcttaaaggagcttctaagtattttcgtattgcaggatattttagaagctcaatttttgagctggttggtgaagaaatatcaaaaattccagaagtgaaaattatctgtaattcagagcttgatttagcagattttcatgtggcaactggacgaaatacagcattaaaggaacgatggaacgaagtagatgtagaatctgaagcgttactaaaaaaagatcgttatcaaatcctcgaccaattactacagtcgggcaacgttgaaattcgcgttgtaccaagagagcgtttgtttttgcatggaaaggcgggatcgattcattatagtaatggatctcgtaagtcgtttattggttcggttaatgaatccaaaagtgcgttcgcccataactatgaacttgtatggcaagatgatgatgaggaaagcgctgactgggtcgaacaagagttttgggcactgtggaatgatggtgtcccattacctgaagcgatactcgctgaaatcaaccgcgttgcaaatcgtagagaagttacagttgaagttttaaaacctgatgaagtccctgctgctgcaatggcagaggctcctatatatcgaggtggtgagcaattgcagccatggcaacgctccttcgtaactatgttccttgagcatagggaagtttatggtaaagctcgtttgttgcttgctgatgaagttggagtcggaaaaactttatctatggcaactagcgcgcttgtaagtgctcttttagatgatggtccagtgctaatacttgctccttcgactcttaccattcaatggcaaattgaaatgatggataagctaggcgtaccggctgctgtatggtcctcacagaaaaaagtttggttaggtgttgaaggacaaattctatcgccgcggggtgactcttcatcaataaagaaatgcccttatagaattgcgatcgtgtctactggcttaataatgcatcagcgagaaaaagctgactttgtaaaagaagctgggatgctgctcaagaatcgcttcggaactgtgattcttgatgaggctcacaaggctcgtgctaaaggtggtttaggtgagcaagcatcagagcctaataatctaatggcatttatgcaaaaaattgggaggcgtacccgtcatcttattttgggtacagcaactccaattcaaaccgatgttcgtgaactttgggatcttcttggcatattaaatagtggggctgagtttgttctaggagacgctttatcaccatggcatgaccatgaacaagctattccattaattacgggtaagacgcaggttacatcagaggcggaaatatggacttggctaagtaatccgctaccgcctggaggtgaacactatattgtccaacagattcgagattatttgcatattgatagcaaaacctttatttgctcccatcgtttcgaagatcttgattatatgattcagcatctgtggttgtctgaatgccttgcacctggtttctttaaggaaaacaatccagttttgagacacaccgtgctcagaaagcgcaagcaactcgaagatgatggactacttgaaagagtaggtgttaatacgcatccgatgacaagaaatttagggcaataccagtctcgttttgtggggcttggaatacccacaaatacacctttccaagtcgcatacgaaaaagctgaggagtttagtaaattactccaatctcgaacacgatccgctggttttatgaagtcattgatacttcaacgaatttgctcaagctttgcttcaggattgaaaactgctcagaaaatgcttcgtcatacgttgtcacatgaagacgaggaccttgtcgaggatgtagagcatattctttctgaaatgacaccagcagaagttgcctgcttaagagaaattgaaactcaactttctcgctcagaagcagttgattcaaaacttaatactgttaagtggttcttaactgagtttaaaacggacggtaaaagctggctggaacacggctgtattatttttagccagtactatgacacggcagagtggatagcaaaggaacttgcgaagtccttcaaaggtgaagttgtagctgtttatgctggtgttggtaaaagtgggcttttcagaggtgagcagtttaacaatgtcgagcgcgaactaattaagtctgctgttaaaactcgtgagatcaaactggttgtagctaccgacgcagcgtgtgaaggcctaaacctacagacgttagggacgctaataaatatagatctaccatggaatccgtctcgtttagagcaaaggcttggtcggattaagcgttttggtcaggctaggaagttcgtggatatgcttaatcttgtttatagcgaaactcaggatgaaaaggtctacaacgtgctatcagacaggcttcgtgatacatacgatatatttggtagtttaccagacacgattgatgatgactggattaatgatgaggaagcacttaatacacgaatgaatgagtacatgcatgagcggaaaaaggcacaagatgcattttcagtcaagtatagaggaaccttagatccagatgcaaatctttgggaaagatgtgcatctgtactttcacggaaagatattataaataaacttagtgagccatgggaataaataaaaagatgttaatttattctaatcagaacttccaataaagtgcagtaattaaggtggtctctcttaagtgatgttgttgatgtaacgatgacgcctatgaataagcgcttaagttcatcttgctttgctcttgtcaccataggaagataagtatccatttaatagtttgaattaaataaaaattaatctccaaataaccatctttaccgatatccgtaaagatggcttaatagtttaatttgattgatgttctagctcatggatatcattgggatacaactacattatttattctccgccctatggggtgaaagcggcttgactctcattctattgttctatctacccgcacgtatgataaacatatcccccaccataaaaaactcccccttgttcaatacaaacatcatgtccatagcgttcatagtcaaagtaatgggataaatgaccaagttgtgctaaatcataacaaccactttcttctatccagtaataacctaagtcatattcattattgacccccgctaattgctggaaagaatccaagttatccgctaaatgaattaaatcatgaattgaactcgctgaagaaccgatttcaattgccgcctgataaaggtcaatttcatcaggcgataacatggctaattgcgtagctaactcgttcaactcatctaaaaggctatattctgaaatgtaggatgaaaggccatcaattgaggattcatagtcggtcaagaaatactcttcatactgaataccatcaataccaatccgcattaaacagtgttcgatctcttttgaggttgccggaagctcaagccactcaccaaccagctctccttcgttatattttcctaaattcgttataaaaacagaaatcatccccgattttaggtatggggaagccattgcagctatgtgcatattcatgtcctattattgatgtgttacattttaataaatgaagatattttgataaagagatctatttccctttaagaatacgatgttgatataaaatccccatcagctgaaaaaacaggcaactcactttaaaaactgattaatgacgctttggagctggataatgagttgccttacagtcccgataacatgttatgctttctatcatgatttttttgcgcgggttaaaacgaaaaaagcccctgtccaataaactggagtcagtttatgatggacagaggctctcgcttttggtggggtatgggctacaaactaaaatacattacaataaaattgtaattatgattacgtttttaggcataagctatttcgaaatcactttattttgactttccaaagaatcgatgtagtcggcatactaccgtattattcgactcctcgtattgcaaatggatttcctatatgacatggttaaagtcttagtgattcattggattattaaacttggcaaaatcgaaaggcgaaatagtttgttccagattagcatccaaataatccgcccaccattgcaccattaatcgacgttcatcaatatgttctgccttatgaatataagctgctctaaccgagtttcgctcttggtggctcatctgcctttctactgcatccttcgaccacaagcctgactcaatcaacgaactacatgccatcgttctgaaaccatgcccacacacttctgtcttagtgtcataccccatcacacgtaatgcgttgtttactgtattttcactcatgggttttctaggattatgatcgccgataaagattagttcgtggttaccgctgaattgataaatctgttttaagatctcaatcgcttgtcggcttaaaggcactaagtgagtagtacgcatttttgatccgcgatgagagtgcttaaccccctctatcgcttcgcgttcagcagggatcgtccacatggcattttcaaaatcaatttcatcccaacgggcgaagcgtagttcactggaacgaatgaagactaacaaggtgagtttgactgcaagtttagttaaaggccttcccttataatcatcgatgcgttgtaagaactcaggtagacgtttaagctctaaggctgctctatggactcgtttaccagtagcaactgcgccagccatatcttgggctgggttatagtcgattaaaccactttgtactgcatagcgcatgatggctgttacacgctgttgtaaacgagccgccacctcaagacgtccagacatctctacggctttaatcggttcaagtagatcacgagtttttagttcggcaatattgcgtttaccaatagcagtaaagatattgtcctcaaggcttttgaggactctatggctatgcccttccgaccatttcttattggttgcatgccaatcacgagctaccttctcaaaggtattaaattccttttgctgttcttctttcacttctttacgtttttcgcttggatcaaatccattagcaattaactttctggcggcatctcttttctctctggcttctgcgagtgaaatatcaggataaacacccagcgctaacattttttgcttaccgccaaagcgatactgtaaacgccaatattttgagccgttggtatgtaccatcaagtgcataccatcaccatcggtcaatttatacgatttatccaaaggcttggcagccctgactttagcatcagtaagagccatgatttatctccttctgttggtacaaactattatcgaatcgagagataccaaacacatataccaacagcaggtacttgatgtgggttgaccttagtatacttgggaagactgaaaagtggggaaaagccttgtaaaactgggatttcagatacgaaaaaagacgtcggttgacgtctcttgatgttcttatggtgccgaaggccggaatcgaaccggcacgcccgtgggcggttgattttgaatcaactgcgtctaccaattccgccactccggcacagaagtgtgttctggaaaacgtcgttattatacttgcggcactctgtggtgcaacaactatcactgaggcggtttgctgagtggttaaaaagacggcgtttcagcaggatacgggatttgtgcggtggcgggagaatcccgctttatttccgcactgaataataatatttttttatttgccgcgattgtgccccggatgaatagacatcaatacaattgcttatataatcctctccggttcccgataaatgtgaggtgggtatgggctttgccggatgggttgcgacaggtatttttattggtatcgtcattggtatcctgttacgtatcttcaaaaaataactgacttacagtgtcatatccctgtgtctgcatggaaggctgttgaattatcatgagtaaattacaccgtcatattgtacgcctgatgccgttatcgctgctggctatcgcgctgtccgcctgttcttcgcagccggagaaacacagtcaagcgtctgccgaacgtccgccgcttgactggtctatcgttgaaagcaatccggaagcactgaagctggcaccacagctggtcgatgagatcggtgagaagattttctccgaaaccgatgcccgcggtatgtttatggtggtgattgataataacgaagtgtttcaccgcagctacggcgagacccgtcccggaaatggtattaagccacggacggattcgctgatccgcattgcgtccgtcagtaagctgatgaccagcgaagtgatggtgaagatggcggatgacggcctggtgaatctcaatgatccgctgcagaaatacagttataaacagtcctccgtgccgtcctataacggcaagccgatccgcctgttccacctggcaagtcataccagtatcctgccgcgtgagcagcccggcgggaaatggggtcgtccggtatttacctggccgagccgtgatcagcgctggacctggctgaaaaccgccaaactgacggctcagccgggaacggaagccgcgtattccaatctggcctatgatttactggcagatgccctggaaaaagccggaaatcgtccgtacagcgagctgttccgccactatgtgacacaaccggcgggtatgaaagatacgacctataatccgtctgccgcgcagtgtaagcggctgatggtcgggtttaaaccgagtgattgttacagcacgctggccgctatcggcagcggcggtgtgtattccaccccggcggatatgcagaagtggatgcagcgtttcctctcttccggtaacacgcagcgcaaagcgacggccaccaaagagcagaccatctattttaaacgtggtcatctgaatgaaattaaagggatggacgttgccggtgaggctgacggtctgggtctcggctgggtgtatctggcgccggtcggggatattccggcgatttatcagaaaaccggcggcggcggcggatttaatacctatatggcgatgataccggagaaaaatatcggtgtattcgtggtgatgacccgcaaagacggtagtaaattcagtccgttaccaaatggtgtcaatgacctggtccgctccctggcagatctgcatacccgtaattacctgtgatacaaaagagcatgcccgcatcaggcgcgggcatgttctgtatatgcagtgactgtttccttaccccttcacacacaccacctgacgcagtgtatgcacaatttccaccagtgatgactgtgcggtcatcaccgcatcgatatctttgtacgccatcgggatctcgtcgatcacatcgctgtctttacggcactccacatgagcagtagcgcgctgctggtctgccactgagaagcgttttttcgcttcggtacggctcatcacacgacctgcaccatggctgcatgagcagaagctttcttcgtttccgcgtccgcgcacaatgtagcttttcgcgcccatagagcccgggatgatccccatctgccctttttgtgccgataccgccccttttcgtgttaccagaacttcctcaccaaaatgctgttctttctgcacatagttatggtggcagtttacggcttcctgctgtgtggtgaacggtttggtgatttcgcgggacagtgcttccagcacgcggtgcatcatcacttcacggttatgacgggcaaaatcctgcgcccagccgaccgcttccatataatcgttaaaatgcacgcttccctcttcgaaatacgccagatcgcgatccggcagattggcaatgtgcgtctgcatatctttttgtgccagcgagataaacaggttgccgatggcattaccgacaccgcgtgacccgctgtgcagcatcacccagacaaaatctgtctcatccaggcacagttcgataaagtggttcccggttcccagcgttcccagatgtttgtagttgttggtattacgcagtttcgggtatttatcgcagatacggcggaactgctcatccagctgcatccagtggttatcaacaatatccgggacatttttccaggttcccttatcccgtccgtgacgttcagtagttcgtccgtgcggtaccgcggcctcaatggcaaagcggatattttgcaggctatccggcaggtcggacgcggtcagtgaggttttcaccgcaatcattccgcagccgatatccacgccgacagcggccgggataatcgcgcctttggtcgggataacactgccgatagtcgatcccttaccgacatgcacatccggcattaccgccaggtgtttaaaaataaagggcatttttgccgtattctgcaattgcagtaccgctttcggatccaccggtacaccgtttgtccacaattttaccggcgcactgttttcctgaatcagttcattaaaatcacgacttatcatttttacattcctttcgtttggtaccggtagtattgcgataagtgtgccagttttgtttaatcggaaaaatttatttatctttatgatatttaaagaataattaattacatcgatttttaagataacatcctgctctgaaatcccgtatgctgtttttatcttttaatatcgtcttttatccggaaagataaatcatgtcatccgcaaagaaaaacgttgtgattggtgttctcggcacggtacttgaccggcgcggcaagaaagccaaccgctggcataaatggcggccgagtatcgggctgtgtcagcagccggatctgcatattgaccgctttgagctggtttatcagccgggtgatatgcagaccgcaggccgggtaaaagaggatatagagcaggcctccccgcagactgaagtgatgctgcgcgaggtggatattgccgacccgtgggattttgagcaggtatataccgcattgctggactttgccactcactacccgtttgatactgaaaatgaagagtatctggtgcatatcaccaccggcacccatgtggtgcagatttgctggttcctgctgaccgaagccagctatctgcccgcgcgtcttatccagactgccccgcgccatgatgcgcgggataaagatcctgccggggtgtataccattattgacctcgatctcagccgctatacacagatcaccggacgctttcagaaagagcagcaggcacaggtcgcgtttctgaagtccggcatcgccacgcgcaatgccggatttaataccatgatcgataaaatcgagcgtgttgctctgcgctccgccgcccctgttctgctgaccgggccgacaggtgccggaaaatcattcctggcacggcggatttatgaactgcgccgcagccgccatcaggtaaaagggcgttttgtggaggtgaactgcgccacactgcgcggcgataatgccatgtccgccctgttcggccatgagaaaggggcattcaccggggcggttcaggcgcgcggcggactgctgaaagaggcggacggcgggatcctgtttctggatgagattgccgagctgggcgccgacgaacaggcaatgctgctgaaagccattgaggaaaaacgatttttcccttacggctcggatcatgaaacagagagtgatttttccctgatcgccggcacacaccgcaatctggcacagcgggtcagcgaagggctgttccgtgaggatttatacgcccgcatcaatatgtggacctttgcactgccgggactggcacagcggcgcgaggatattgagccgaacgtggattatgagctggcgaaatacagccgcgatcagcagacccgtgtccggtttgataccgacgccaggcagcactacctcgcctttgcctgctcaccaccggctttgtggcgcggtaacttccgtgaactgagtgcctctgtcacgcggatggcaacctttgcagagaacgggcggatcaccaccgcactggtggaggaagaaaccgaacggctgaaaaatcagtggcacagcacggaaacagcggtgacgttgcctgccggggtgggtgaaattgatttatttgatcgtcagcagctggaaactgtaattgccgtctgccgccgttcacagacactttctgatgccggtcgcacactgtttgccgtttcccgtcagcagaagaaacaacccaatgatgctgaccggctgcggaagtatctggcccgttttaatctcagctgggaacagattaccggccgctgaaatgacagagccggtcagtatgcactgaccggctccggattcggatgtccgtaactgcttacttacgtttgatcagcatatataaactgatcgccaggaacagcaggctcggcagcagtgcacccagtagcggcgggaacttataggtcaggctgagagagccgaaaatctcattggaaacgtagaacacgaatccgcaggcaatccccgtcacaacccgcacgcccatcgctaccgaacgcagcggcccgaagataaacgacagcgccatcagcatcatgaccgccacagaaagcggtgcgaacacctttttccacaggttcagctgataacgtcccgcgtcctgtccgctctgctgtaaataatcaacatactgatacaggccgcttatcgacaatgcttccgggtccagtgcggccacactcagtttttccggagtcatctgcgtctgccaggtcatggacagtttctgctcaccggcaatcacataagtatcctgcagaatggattcctgtacctgactcagtgtccaggtatcggaatccgaattgtagtccgccgccgccgcactgaggatagatttcagtttgtggtcgtcgttcatccggtacagtgtgatgcccttgagctgggtttcgctgtcaacgcgctggatatagataaagtcactgccgtctttggcccacatcccgcggttggttgccagcagagacgcgccgcttgttttctgtgcacggtagttacgtgcccactgctcaccggacggcgcgagccattcaccgacaatcatggtcaggatcaccagcgggatagcggttttcatcaccgaacccgccacctggaggcggctgtaaccggaagcctgcatcaccaccagctcactgcgggtcgccagtgcacccagccccatcagagccccgagcagtgctgccatcgggaagaaaatctgaatatccttcgggatactcatgatggtatacagcccggcatcccaggtggagtattccccctggccgactctgcgcagttgatcgacaaatttgataatcccggataatgacaccagcataaacagggtcatcatgatggattgcagaatcgtccgcccgatgtagcggtcaagaacaagtactttaaacatcaggcaaccccctgaacacgggcagagccaaagcgcagacggcggacagctgtggtattccacagattcagtaccaccgcgagagccagataactgagattaaccacccacggccagaccatcggatccagcttgcccttctcgccgcttgaacgcagcgagctttgcagcaggaagaaaatcagatacagcagcatcgccggcagcatactcagtacgcgcccctgacgcgggtttacctcggagagcggtactaccatcagcgccatcaccaccacggagaaaatcagagtcagacgccagtggaattccgcgcgggctgctttgtctgtctctttccatagttcagacaaggtcatctgctggtagttactgtcaccggtttttgcatcacggtgatcaacaattgcctgataatcggtaaaatccgtgatccggaaatcacgcagatacgcggttccctcataacgggtgcctttatccagcaccaccacctgattaccgttctctttttcggtcatatggccgccgtccgccaccacaatggacggacgctgttcgtttctcgcccagagctgggcaataaagacattagtgaacttattaccgtcaacatccccgagatagagcaccatactgccgtcatcagagactttaaactgcccgccgaccatcgcggtcacgcccgggttggctctgacttcctccagaaccttttcctgatactgggatgaccacggcatcagccagactacattgacagccgccacgatggcggtaaagaacgccaggatcatagcggctttcaccagcacattattacccagaccacaggcatgcatcacggtgatttcgctttcggtatagagtttgctgtaggtcatcagcaacccgaggaagagactcagcggcagaatgagctgcgccatctccgggatacccagccccagcagtgacacgacgagtccggccgggatgctgccttcaacggcggcacccaggacttcaaccagtttttgacaaaagaagataagcaacaggataaacagaatcgcaatctgtgcttttaatgtttctcttaccagatatctaataatgatcacgcttaatacgcctgtgaaaacttgtgtttttgcatgaaaatagctaacttcgttctgtgttgactatttgtgtgcattattttgccggcctgaggatgattccggtatcagactacgctttttccttcctgtcaggaaagaaacggaattttcatgagattcaggactcataaagtgcgcacacagcttatcataaactgtttataatcgatggtgcagattagtgcgaacgctacattttagcggcagcagttgtctttgtctttaagattcaggagagcgcatggagtttagtgtaaaaagcggcagcccggaaaagcagcgcagtgcttgtattgtggtcggggttttcgaaccgcgtcgtctgtctcctgtggtggagcagctcgataaaatcagcgacggctacatcagtgctctgctgcgccgcggcgagctggagggcaaggtcgggcagtctctgcttctgcaccatgtcccgaatgtcctgtccgagcgtatcctgttaatcggctgcgggaaagaacgtgaactggatgaacgccagtacaaacagattatccggacgaccatcaataccctgaatgaaaccgggtcaatggaagccgtctgttttctgaccgagttacatgtcaaaggccgcaataactactggaaagtccggcaggcggttgaaacagccaaagaatctctctatgtctttgatcagctgaagagtaacaaaaccgaattacgccgtccgctgcgcaagctggtcttcaatgtaccgacccgccgcgaactgccgaccggcgaaaaagcgatcagccacggtctggcgattgccgccggtatcaaagccgcgaaagatctggccaatatgccgccgaatatctgtaatgccgcttatctggcatctcaggcgcgtcagctggcagacagcaactctccggtgctcagtacccgtgtcatcggcgaagagcagatgaaagagctgggcatgctggcgtatctggccgtcggccagggatcacgtaatgaatccctgatgtcggtgattgaatataaaggtaatccggatccggaagcacgtccgatcgtgttagtcggcaaaggcctgacctttgactccggcggtatttccatcaaaccggctgacagcatggatgagatgaaatacgacatgtgcggcgcggcaaccgtctacggcgtgatgcgcgtggtggcggagctgggtttaccgctcaatgtgatcgggattctcgcaggctgtgaaaacatgccgggcggcaatgcctatcgtccgggggatatcctcaccaccatgtccggccagacagttgaggtgctcaataccgatgcggaaggccgcctggtactgtgtgacacactgacctacgccgagcgttttgatccggaaacggtgattgatatcgccacactgaccggtgcctgcatggtcgcactcggtaaccacttcagcggcctgatggcaaaccacaatccgctggcgcacgagttactgaatgcctctgaacaggcgggtgaccgtgcatggcgtctgccgctggcagaagagttctacgagcagatcgagtccaattttgcggatctggcaaacaccggcggccgtctcggcggcgctatcacagcgggctgcttcctgtcccgttttgccacccgctataactgggcgcatctggatatcgccggaaccgcatggcgctccggaaaaaacaaaggtgcgacaggtcgtccggttgcactgctgtcacaattcctgttaaatcgtgcgggtatcagcaccgacgactgaccggaattgccgggcctttgcggcccggaaaaagcataaaggtaacgggggattgtgctatcctgagcaatccccttttctgctatcagagatattatgaaaaacgccaccttctacctgatggaacagccatccccttttgatgaccttgaggcccacgagtggctgacctgtcatctggcgggtgaagcctggcgcagcgggaaacgggtgcttatcgcctgtgagtcacaacagcaggcggagaaactggacgaagccctctgggcgcgggagcccgatgcctttgttccgcataatctggccggagaaggcccgcgttacggcgcaccggttgaactgtgctggccgcagaaacgcggaaattccccgcgtgatttgctgatagccctgctgccgcagttcacagattttgcgacaaccttccgtgaagtgatagactttgtgcctatcgatgaacacttaaaacagttggcgcgcgagcgatataaaatctatcgcagcgtcggctttacgatgaccatggccacgccgccagcttactgataaacaaagattaaaaatggaaaagacaaccgacaaccaacaggcctgcgagccgtccctggataaaacctataatccaacggaaatcgaaggtcctctttatacccactgggaaaaaagcggctatttcaaaccgaacggcagaacagacaaagaaagcttctgtatcgtgatcccgccgccgaacgtcaccggtaacctgcatatgggccatgctttccagcagaccattatggataccatgatccgctaccagcgcatgcagggcaaaaacaccctgtggcagtcagggactgaccacgccggtatcgcgacacagatggttgttgagcgcaaaatcgccgcagaagaaggcaaaacccgccacgattacggccgcgaaggctttatcgataaaatctgggaatggaaagcggaatccggcggtaatatctccaaccagatgcgccgtctgggtaactccgtggactgggagcgcgagcgcttcaccatggacgacggcctgtcagctgcggtaaaagaggcgtttgtccgcctgtataaagataacctgatttaccgtggtaaacgtctggtgaactgggatccgaaactgcacaccgcaatttctgacctggaagtggaaaaccgtgatgtcaaaggtttcatgtggcatatccgttatccgctggcggacggcgcgaaaaccgcagacggtaaagattacctggtggtcgccaccacgcgtccggaaaccatgctcggtgataccggcgtggccgttaacccggaagatccgcgttacaaagatctgatcggcaaagaaatcattctgccgatcgtcaaccgccgcattccgatcctcggtgatgaacacgctgatatggaaaaaggcaccggttgtgtgaaaatcaccccggcacatgacttcaatgactatgaagtcggtaaacgccaccagctgaccatgattaacatcatggacttcgacggcaacatccgtaccgaagccgaagtgtttgataccaacggcgaagtgactgacgcctgcagcagtgaaatcccggccgcataccgtggcatggagcgtttcgctgcccgtaaagcgatcgtcaaagagttcgaagagctcggcctgctggaagagatcaaaccgcacgacctgaccgtaccttacggcgatcgcggcggcgtggttatcgaaccgatgctgaccgaccagtggtatgtgcgcactgccccgctggcaaaagaagccatcaaagcggtggaagacggcgatattcagttcgtaccgaagcagtacgaaaacatgtacttctcctggatgcgtgatattcaggactggtgtatctcccgtcagctgtggtggggtcaccgtatcccggcctggtatgacaatcagggcaacgtgtatgtcggccgcgacgaagacgaagtccgccgtgaaaacaatatcccggcgatggttgaactgcgccaggacgaagacgtgctggatacctggttctcctccggtctgtggacattctccaccctgggctggccggaaaacaccccggaactgaaaacattccacccgaccagcgtgctggtcagcggcttcgacatcattttcttctggatcgcccgcatgatcatgatgaccatgcatttcatcaaagatgaaaacggtaaatcgcagatcccgttcaaaaccatctacatgacgggtctgatccgtgatgaggaaggtcagaagatgtcgaaatccaaagggaacgtcattgacccgctggatatgatcgacggtatctctctgcctgaactgctggaaaaacgcaccggtaacatgatgcagccgcagatggcggaaaaaatcgccaaacggactgaaaaacagttcccggaagggattgaagcccacggtaccgatgccctgcgctttaccctggcggcgctggcctctaccggccgtgacatcaactgggatatgaaacgtctgtccggttaccgcaacttctgtaacaagctgtggaacgccagccgtttcgtgctgatgaataccgaagagaaagactgcggtcagaacggcggtgagatggaattctctctggccgaccgctggatactcgcggaatacaacaataccgtgaaagcataccgcgaagcgctggatacctaccgctttgatattgcgtctaatattctgtatgaattcacctggaaccagttctgtgactggtatcttgagctgtccaaaccggccgttcataaaggtaccgatgcacagaaacgtgcagcgcgtcataccctgatcaccgtactggaatccctgctgcgtctcgcacacccgattattccgtttatcacggaaactatctggcagcgcgtgaaagtcgtcaccggcgcggaaggcgataccatcatgctgcagccgttcccggaatatgatgcctctctgaacgacgagcaggcactgcgtgacctggagtggatcaaagagacaatcgttgcggtacgtaatattcgtgctgaaatgaatatcgcaccaagcaagccgctggaagtgatgctgcgcggggcaagtgctgatgcacagcgccgtgttgcggaaaacagcaacttcctgaaagcgatggcgcgtctggaatccgtccgtgtgatggctgaaggcgaaactgcaccggtttgcgtgaccaagctggtggaaggcgcagaaatcctgatcccgatggctgatcttatcaataaagacgacgaactggcgcgtctggataaagagctggaaaaaacggagaaagagatcgcggctatcgaaggcaaactggcgaatgacggctttgtcagccgtgcgccggaagctgttgtagccaaagagcgcgagcgtcttgcggcaaaccgtgaagcgaaagaaaaactgattgctcagaaagccacgatcgcagcactgtgatcctgacggaatgagtagtaaaaccagcctccgggctggttttttttatcccccattctgcgtatttactttgcgtgataattatttattatcttatttatcgtttcatacgatatccacagtaatcgcccctcaggtttattcccccggctttacttttcacaataaaaataatgagataatgatatccatgacaagcagcacaacagaaaaccacaccctccgtctgatccgtccggaagataaccccggcatcgcacaggttatccgtgaggtctctgccgaacacggcctgaccgcagacaaaggctttgcggtcgctgacccgattcttgattcattatatgaggtttacagccagccgcgtgccgcatactgggtcattgagatggatggggaaatcctcggcggtggcggcgtttccggccttgccggtggtgacgggaaaaccgctgaattacagaaaatgtatatctcctcccgcctgcgcggcaaaggtctggcgaaaaaaatcgccctccaggcattggaatttgccgaagcggaaggttacagccagtgctacctggaaaccaccgctgacctgcaggccgccattaagctgtatgaaaaactcgggtttatcttccttgatgccccgatgggtgacaccggccacagcgactgtgaagtccggatgctgaaagtctttactgcctgatcccctgacatacagacacaaaaaaacctgccgcggcaggtttttcagtcatggcagatgattagtgtaacggcgcctcatcagcatcgtcatcatcttcatcttcggcatccgggtcttcgaaataggtgccccagccgtcgtaatccacatccattttttctgccagacgcgccagctgctctacctgagcatcgatatgttccgccgtcagcccgcattcactgatgatatcgcaacataacaccacctggccgccttccacttccagctcctcggcatctgtcacttcataacccagtttgaaagcttcaactgccgctttttccagcttgtcgtaattctcactcgaaaaatggtgttcaatggtgtattgcgcatcaggatcgctgccgtcttccagcagttctgcaataatcgcacgggtttcttcgcgctgttcttctaaaaacgcatctaattctgacatggccatgtcctctgataagtgatacccgcgcattctcccacagccgcgccaattgagccacccataataaaaaagaatttcccgccggtgttgcaattgaatttttattgatttatgttgaatataaattcatcggagatacggatatgaacccattttatcaacagtcatttttgcggttgcttgactataaacctgccgacatcgaagaactgctcaatctttctgcttatctgaaacatgccaaaaaaaccggctcggaaaagccgctgataaaaggcaaaaatattgcgctgatttttgaaaaagactccacccggacccgctgtgcctttgaagtgggtgcttacgatcagggcgcacaggtgacatacctgggctcatccggcagccagataggccataaagagtcgatcaaagataccgccagggtactgggccggatgtatgacggcatacagtttcgcggctattcccagaaatccgccgaagcgctggcgcaatattccggtgttccggtctggaacgggctgactgatgagtttcatccgacacagctgattgcggatttactgaccattcgggaacatgtgaaaaaaccgctgtccgaagtgaaatttgcatatttaggcgatgcccgtaataacatgggcaataccattgctgaaatggctgccgtaaccgggatggatgtccgcctggtggcgccggccgggtgtcagccgtcagaaacccttatcgcgcagtgccgtaaagccgctgaacttaccggcggtaaaatcaccctgaccgccgatgtggcagagggcgtgaaagatgcggatgtgctgtacaccgatgtgtgggtttccatgggcgaggcgaaagaagtctgggctgagcggatcaaactgctgacgccgtatcaggtaaatcaggatgtggtggataaaacgggcaatccggatgtgatctttatgcactgcctgccggcgttccacgatacggaaaccaccatggggcaatccctcgcggaagagtacggttttaccagtggtattgaggtcaccaatgatgtgtttgaatcaaaacacagtgtggtgtttgatcaggcagaaaaccggctgcattccatcaaagcggtgatggttgcatctctttcaaaaaacatacaattttgaatctgcccgcagcgttgcataaatttcactcaaaaaagtgatgccaaacgcttgcgcccggttgcaggttgcgtataatgccccgcaattttgtcgggaggaaacaatggtcattgtgattatcagcaccgtaaagccggtgccggacaatgtgacatatcacggacagccgcagcgcggcaatgtctgccatacccccgtatttatttcagaacccctcatttgaggggtttttttttgcctggccgaaacatgaggagaccccaatggcaaatccgttatacctgcgcgatatcatctcgattaacgatctcagtcgtgatgagctggaactggtattaaacactgccgcggcgctgaaacaacgccctcagcctgaattactgaagcaaaaggtgatcgccagttgcttcttcgaggcctcaacccgcacgcggctctcttttgaaaccgccattcagcgcctgggcgcgtctgttgtcggcttttcagacagcagtaacacctcgctgggcaaaaaaggcgaaaccctggcggacactatgagcgtaatcagtcagtacgcggatgccatcgtgatgcgccacccgcaggaaggggccgcgcggctggtgtctgagttttccggtaaggtaccggtgatcaacgccggtgacggtgcgaaccagcatccgacacagaccctgcttgacctgtttaccattcaggaaacccagggccgcctggagaacctgcatatcgccatggtcggtgacctgaaatacggccgcactgtacattcgctgtcacaggcactgtcaaaattcagcggcaaccacctgcattttattgccccgcaggcactggcaatgccgaatcacatcctgcatatgctggatgaaaacggcgtggcgtacagcgaacatcattctattgatgaggtacttccgcagttggatgtgctgtatatgacccgcgtgcagaaagagcgccttgacccgtcggaatacgccaatgtcaaagcccagtttgtgctgcgtgcggctgatctggccaatgtgaagacgaacctgaaagtgctgcacccgctgccgcgcatcgatgagataaccccggatgtggataaaacgccttacgcgtactacttccagcaggccggtaacgggatctttgcccgtcaggcactgttatctctggtgttaaacgaaactttcccggcctaaggagcacatcatgactcaggatcataaattactggttgaagccatcaaatgcggcaccgttatcgaccatatcccggcaaatgtgggatttaaactgctctcctttttccgcctgaccgagacggacagccgtatcactatcgggctgaatctgccgtccaacaatatgggtcgtaaggatttgattaaactggaagataccttcctgacaccggagcaggccaaccagctcggtttttatgcccctaaagccacaattaatattatcgaagattatcaggtggttaaaaaactgccgattaacctgccggaacgcattgaaggggtgattgtctgcccgaacggcaactgcatcagtcacaatgagccggtggaaagcagctttactgttaagtccattgcacaggaaattgtgttaatctgtaagtactgtgagaaagaatttgatcaccacgcaatcattaataaccaataagatagatccaggtcagttgtcagggaaaatcagacgattataatgatggcgtttttaaaagcttaacagcaataatcatcctacaggagtccgtaatgactaaagtaatcgcaacagaaaacgcaccagcagcaatcggcccgtatgtacaggcagtagacctgggtaacatggtaatgacttcaggtcagatccctgttgatccgaaaaccggtgcagttgctgacgatgttaaagctcaggcacgccagtcactgaacaacatcaaagctatcatcgaacaggctggtctgaaagttacggatatcgtgaaaacaactgttttcgttaaagatctgaacgactttgctactgtgaacgcagaatacgctgctttctttgatgagcacaaagcagtataccctgcacgttcttgcgttgaagttgcgcgtctgccaaaagacgttaaattagaaatcgaagcaatcgcagtccgtaaataatcactgcgctttctgagaacgatgatgaaaaccctgcaaggtgcggggttttttttatacccgtaaattttccagaagctgatcaaaagagactctgaccttttcataagtggcctgcggatcatcactgtgcacaatccacatcgcacattcatacagcccgccattaataaacagtgccagcacatccggtgccacctgttttatccgtccggtttccatcaggtgtgtcagacgccgggtgatcccctgcacacaggccagttcgtgagatttgagaatggaaaaatccagtaccgaggccgcatcacggaacataatccgctgaacttccggctccagactcattgccagatagccctgacaacgggatttgaaagctgaccactcatccgcttcgtctttttctgcggtatccaggcgcgcatccagttcccgatccaggtcctgcagcaccgccagaaacagcccttttttatcaccaaagtgatgatacagcgccccccgggtgagacccgcctgagccgtcagatcatccatcaccgtcgcggcgtacccggccttaccaaactgctggcgtgcagcacggataagcttggtccgcgtttcttctatcatctctgcacgtggcttgtggctcatttcattactcctgcggtcagctctttcagccggggattatagcacttttttattgacatacatcgcgtatgtcaatagattcacatacgcaatgtatgttaattgcattacagccggctatctccggcagttaaaaattatatccgcctgtaatataacggatatctgtgaggttgttatgttcagctcttatcgcgtcatctttcagcatcccggcaccaaagccttttcaggggcgggatttatcgcgcggatgaccgtctccatgatggggattgggatcattactatgattgcccaattgcgtgattctttctttatggccggggtaactgcggctgtttataccttttcggcggcattctgcgccccgctgatcgcccggctggtggatcgctacggacagagccggatcctgccgaaaacgctggtgatcagtgttcccgcgactgccgccctgctgttatgtacggtttatgatgctcctgactgggcaatctggctgtctgctgtttttgtcggggcgatcccgagcatgcctgccatgatccgctcccgctggacacatatctataaaggtgacccgcgtttacagaccgcttactcctttgagtcggtgctggatgaaatcagctttattatcgggccgccgctgtcagtcacgctctgtatcgccctgttcccgcaggccggtccgctggcggcaattatttttctgataatcggtaccgcgctggtggtctgtcagaaacggactgaaccgccggtgcataaacgcgacgggctggcaaaaggcaccgtgctgcgcctgcctgcgattcagctgctgatggtggttctgcttgcgctcggggtgattgtcggaacagtggatgtgctggctgtcgctttcgccaatgcacagggatatccggagggtgccagctacgttctgtccgtgtatgccgccggttcctgtatcgccgggtttatcttcggtgctatccggctgccgttcagctacacaaaacagttcgtctttaccgccgccgccacactgctgaccactctgccgctgctgctggtcaccaacctgaccgggctggggctgaccatgtttgtcgccggtttcttcttctcgccgaccatgatccttgctatcggctttgtcgagcgtgaagcaccacctaatatgctgacagaaggctttacctggctcatcaccgggctggcggtcggtgtggcactcggctctgccggagtcggtatgatcattgatacttacggcatcgatgccgggttcctgctggctatcgctgcggggatctgcgtactgctcaccgcctgcatcggttatgttttcgtcttcaaagacgataaaaacagcgctgataagtgacagaaataacttttaatataattttcagcaatcaaaccgcacatttttacacttaaccggagtgtgcggtttgcctgatgtcgccagaattctttgacttaaatcaatttcaatcgccttattccggaggaaatctatatctagtgctatataatacaaagcacactagatatagtatttattcacagtgttatccacaacgccatgaagccgcattatgacaggttttgccctgtggataaccaaactgccggagagaagcaaagtgcacactatcgtgattaagcgtgatggatgtcaggtaaattttgatgaatcacgcatccgggatgccattaaaagagccgccaaagccgcacgtgttaatgatgatgactactgctctcaggttgcctcccgggtagcctccctgctgggtgaccggaaaaaggtcgatatcggtgagatacaggacgccgttgaaaaccagttaatgtccggtgattacaaagagttagccagaacctacatcgaataccgtcatgatcgtgacgtggcgcgtgaactgcgcggccgcctgaataacgagatccgcgggctggttgaacagagtgatatgtccattctcaacgagaatgccaataaagacagcaaggtgatcccgacacagcgtgacctgctggcgggtatcgttgccaaacactacgcaaaacagcatattttaccgcgtgatgttgtaatttcgcacgaacgcggcgaaattcactatcacgatctggactacgcgccgttcttcccgatgtttaactgtatgctgatcgatttaaaaggcatgctgactcatggctttaaaatgggtaacgctgagatagaacagcctaagtccatctctaccgcgacggcggtaacagcacagattattgcccaggtggccagccatatttacggcggtaccaccattaaccgtatcgacgaaattctcgccccgtttgtcacggccagctataacaaacatctgaaaactgcaaaagaatggcagattccggatgcggaaggctacgccaatgcccgtacagaaaaagagtgttacgacgccttccagtcactggaatatgaagtcaacacactgcacaccgccaacgggcagacaccgtttgtcaccttcggcttcgggctgggcacctcaaaagaatcccgcatgatccagcaggcaattttacgtaaccgcattgccggtctgggtaaaaatcacaaaacagcggtattcccgaaactggttttcgccattaaaaaaggtctgaaccaccagtacggcgatccgaactatgacatcaaacagctcgcattagagtgcgccagcaagcggatgtatccggatatcctgaactacgaccaggtagtgaaagtgaccggctcctttaaaaccccgatgggctgccgcagcttcctcggtgtctatgaagagaacggtgaaatgatccacgacgggcgtaacaacctcggggttatcagtctgaacctgccacgcattgccattgaatcacagggcagtgaagcggatttctggtcactgctggatgagcgtctggtgcttgccaaaaaagccctgatgacccgtatcgcacggctggaaaatgtcaaagcccgtgtcgcgccgatcctgtatatggaaggtgcctgcggcgtgcgtctgaaagcggatgactccgtcaccgaaatctttaaaaacggccgcgcctcgatttcactgggttacatcggcatccatgaaactatcaatgccctgaccggcactgaaacgcacatgtatgacgacgaacagcgccgcgccctcggtgtcgccatcgtggaacgtctgcgtcgtgcaaccgacgaatggaaaaccgaaaccggctacggtttcagcctctacagcaccccgagtgaaaacctgtgtgaccgtttctgccgcctggataccgccgagttcggcattatcccgggtgtgactgacaaaggctactacaccaacagcttccacctggatgtggagaagaaggtcaatccgtacgataaactggatttcgaagcaccgtatccgccactggcgaacggcggttttatctgctacggcgaatacccgaacctccagcacaacctgaaagcactggaagatgtctgggattacagctacgaccgtgttccgtactacggaaccaacacgccgattgatgagtgttatgaatgcgggtttgccggtgaatttaactgtaccagcaaaggctttgtctgcccgaaatgcggcaaccacgatgcttcccgcgtctctgttatccgccgtgtatgcggttacctcggcagcccggatgcccgtccgtttaacgccggtaagcaggaagaagtgaagcgccgcgttaaacacctgaataacggccaactggggtaatgcagtgaattatcatcagtactatcccgttgacgtggtcaacgggccgggtacacgctgcaccctgtttgtctccggttgtgtgcatcagtgccgcggctgctataaccagagcacctggcgcactgattccggtgtgccgtacacccgggaactggaagatatgattatcgccgacctctgtgatacccgcgtaaaacgtcaggggatcacactgtccggtggtgatccgctgcatccgcacaatgtgccggagattctggcactggtgcagcgcatccgccgcgagtgcccgccggaaaaagatatctggatgtggacaggttataaactggatgaactgaatgatgcccagcgggaagtcattgagcatatcaatgtgttagtcgacgggaaatttgtacaggatctgcatgacccgatgctgatctggcgcggcagcagtaaccaggtcattcactatctgcgctgacacccgcgctgaaccgcgaccagtgcagtttctttccgaaccccagcgtattattcaccatctttatctcatccagccgcaacccccgcaacggggttttggcagcaatagctaccggaaagcgtcggcagtaaacggctctcgcctgcttttcctcttccgctgacaatgtcgtaatctctcctctgaactggatcccgcagatttttgccacagtcaccgtctgtgcggaaatggttcccgccaccagcggattctgctgcatcagcgtaccgtgccgggtatgcggttcagtgaggaaataaagcatcattgcgccggtgtccgcgacataaaagcaggaagcacaccacagatcatcaccggcggtagtgcacagcgtaaagacatgatttttcttcagataagacaggattgaatcgtgcggtaattccatacagtacccccaataaaaccacaccggctgacagagtatatcatccggtgctggttcagacagtcccgtcagacgggctgtattgtatgacaaatatcagggattatttatagagttctgctgtaccgcccatcaggttttcaccaccggcagaggtgatacggaaagaagttgcaccagcttcatcagcttttttggataaggcagcggtcacatcagccaaggtatcaacatcgctgacagagacaacaccgaccggagcctgagtgctgtgctgaacttcagttgcagcaaaagaaccaaatgaaacagcactcaacgctaaaacagcagggatgattgcagaaattttcataattttattcctcagaatatcgttagtatcatgagacatttttgtctctctttgtgatgtgagtcatactatgcgctttccggcggaaagaaaattagctatttttgccatacttattcaattattttgatgataaaaattttaattaatcaccgggaagaactatcatgtgaaatactactgattaattagttacttgcgtgactattacccgactaaaatcaacaaaatattcgcctttcatacaaacataaaaaggcacgattaaacaaaaatgacgatagcatcagacaaaaatacgtggtttctttacataatcaggacagaatccggatatctttacacagggatcacacgtgatgtcgcactgcgcgttgcgacacatcagtccggaaagggtgcgaaatatctgcgggggaaaacagggctgcatgtggtatatcaggccgctctggcggatcgctcaatcgcatcaaaagaagaataccgggtcaagcaactgacaaaacagaaaaaagaaaggctggtcagtgaccagccttccgatttgacgacatatcttaacggtggtgattattcacagctgtcaaaatgatgtgagaaattaaccagcccgtgataacggtctgcggcatcattttccagcggatagatcaggaaatacggtgcggtatccggccatttgcagtgcagatcaaactctgctgccggtttaaatccccacttaccgtaaacttctggatcccccagcaccacaaccgcgccgtaaccaaactcattgaggctgtccagcccctcataaaccatctgcttcgcaatgccctgaccacggtaagcctctgccaccgcaagcggtgccagtccgacccactgacaatcctcgccttccacatccacgggcgtgaaaccggcgtaaccgaccacctgcccttcatcatcggtggcgaccacacccagggtcagcagaccgtcttcccgcagtgcatgcagaagatcagcttcgttgtcacgcccgaatgcgctgcgcagcagtgcatcgataccggcggcatcaaccggaatttctgtgcggatcagcatgaggtcaccactgcctgcgatttatccccgtcttccgccagcccggcctgaataaactcagccagctgcattaatgcactgcgcagcagcggcggcataccatcgaggtcaatcgagtccatcaggtttttgacatacagacccagctcggtgtccccttcaatacgcagacggcgctggaaaaacagggtatccgggtcctctttgcgggccgcgatcagcaccagatcattagcattaccgctgaagctgacatcttcctgttcatccgcactgaccaccagacggccgtcacggttactgatataccagtgaagcgccaggtcacggacttccaccttcagccatttattttccagaaaatcgagatcgccttctgtcagcgcctcttcaaactgacgcgccagaacctgctgaagaacctgtttttgcagggtaaacggcgttaatttcagcgggaaccgcaataacgccggcccgttgtgtacgagcgaggaacgaattttggcaaacaccgtactgactccttaatctgaattactgcgccattgtgccagaatctgcagaaataactcaggattccggtcaatttttcgtgtcattgtttctattatatacccgattttcttcctgccgcagagaacatcccgcttttatatccgcaaaccgggtgattttttgcggtaaatgttcactaacctgcctcaggtcaataccttttttagcctgccatttacaatttccgatcatttttattattcagtctgagagtctcaccatggaactattgtgtcctgccggtaatttacccgcactgaaagccgccattgataatggcgcagatgcggtttatatcggcctgaaagatgatactaatgcccgtcacttcgccggtctgaattttactgaaaagaaactcgccgaggcggtggattatgttcacagccaccggcgtcacctgcatattgcgattaacacttttgcccatccggatggtttcagccgctggcagcgggcggtggatatggccgcacaactgggggcggatgccctgatcctcgcggatatcgccatgctggaatatgctgcggagcgttatccgcacattgagcgtcatgtctctgtgcaggcatccgccaccaataccgaagctatccgtttctatcagcgcaactttgatgtgcaccgtatcgtactgccccgtgtactctctatccatcaggtaaaacagctggcacgcaccagcccggtgccgctggaagtctttgctttcggcagcctgtgcatcatggcggaaggccgctgctacctctcctcctacctgaccggggaatccccgaataccgtcggtgcctgctctccggcacggtttgtccgctggcaggagaccccgcaggggctggaatcacgcctgaatgatgtgctgattgaccgctacggcgcagatgagaacgccggttacccgacactctgcaaaggccgttactgcgtggacagcaagccttaccatgccctggaagagccgaccagccttaataccctggaactgctgccggaactgatggcggcgaatatcgcctcagtgaaaattgaaggccgccagcgcagcccggcctatgtgactgatgtggcgaaagtatggcgtcaggccatcgaccgctgcaaagccgatccggacaactatgcgccggatgccgcgtggatgcagaccctcggcggcatgtcagaaggacgccagaccacactcggtgcctatcaccgcaaatggcagtaacggagagaaaaacgatgcaattttcattaggttcagtcctctattactggccgaaagcaacactggaacagttttatcagcaggcaatgcaaagcagtgcggatattatctatctcggcgaaaccgtgtgcagcaaacgccgggaaatgaaaccggatgactggataaatctcgctaaaacagttgccggaagcggcaagcaggtggttatctccacgctggcactgttacaggccccgtccgagctgaaagagatcgccaaactggtggataacggcgaatttatgatcgaagctcatgatttcggcgtgattaatatgctgcacgagcgcgggctgccgtttgtcgccggacacggcctgaactgttataacgccccggcgctgaaaattctgcaaaaacaggggatgacacgctggtgcatgccggtggagctgtcccgtgactggctggtgaacctgctgaagcaatgtgaagagctggggatccgcgacaaatttgaagtggaagtgatgagctacggccatctgccgctggcctactccgcccgctgcttcaccgcccgttcggaaaaccgcgccaaagatgactgcgaaacctgctgcatcaactatccgcgggggcgcaaagtactctcgcaggaaaatcagcaggtatttgtccttaacgggatccagacacagagcggttactgctataacctcggcaatgatctgcgttccatgcatggactggtggatatcgtgcggatctccccggatgcaccggacgatctggcggtcatcgaccatttccgtcagaatgaaaccggcgcacagccgctcgatctggcacaggcacaaaactgcaacggctactggcgtacagtggcgggcctggaactggtggaataacggaaggaaataaccatgactgatgtttatgcccgtttaaaagcactgaatattgaactgccgccggtcgttgtaccggatgcaaaatttcagccgtatgtgatttttgataacacaattaccctctccggccatttatccaaaaccggggagcagttaaataccggtaagttcggggcggatctgaccattgtacagggtgagaaaattgcccgtcagctggctgttaacctgctcggtacactgcagggcgcggttggtgatctgaataagattaaaaagatcatcaacctgaactgcatgattaacggtacaccggattttaccgaccctcatgtggtagcgaatgcctgttcacaggtttttcatgatgttttcggtgagaaaggctatcacagccgcaatgcactcactgtggcgcaactgccgttcggcgcctgcatggaaatatcgctgatcgcgggtattgagtaacaaaacagaacgggcgcgatatctgcgcgcccgcttttaccggcgttatgcctcacgttgcgtaccctgatcctcttttcccccggaaaccgtgagaacgggatttcatttatttaacaggctctttttttccgccggaataaccgtcgcagggaatgcgtaatacgccgtaattccccgtcacgcaacataccgataaataccccgagaagcgtataaataatcccgagcaccagcatcataataatatcattctgcacgctgctgaacggtaaatccatctggttgatacctgcaatcgctttggtcgcccaggtggacggcagtgcggaagcaataaaccgcacccagtccggcatagcctgtaacggccagatggtgcctgacatataaaagaccggtgtggtgacaaaggccagtgtcaggtaaatcatctccacactgcgcagacattcagtaaccagtttgcccagtcccagtactcccagcaggaacgggaatgtcagcagccatagttcatacatcggcgcttcctggcggtatcccagcacccacggccacagggcaaagaagaccgtcgagagaaacagccagataggcagcagtgcgctcagcgcccccagatacaccgccagcggcggtttacctttcggcgtactgcgcaccgcgatactgacacggacacaggctatcagcagggagtgctgtaataacatgaccagcagaccggggaacacaatcgccgcaaagctgacacccgggttatacatagccaccgtttctgactgtatcggtgaaataatcagtgacgcctgttccggtgtatagcccgcatcctgcaaaatacgggtgttatagccccccagcaactcctgatatgccttgctcagctcctgctggatctgcccgctggccagacggttcgtcgcatccccgaataccgggacagtgatatttttaccctggagaatatttcgctcaaaatcagtcggaataataatgatggcgaataactcgcgcataatcatatcgcgccgtgccgtctccaggttgtcataaccgtgcagctccactttggcggttgcatccagctgccggatcagtgagcggctggctgcggagtgatcctggtcaatcacggcgacaggcagatcccacaagaccggccggacatacaccaggctcatcacacacagtgaaaccaccagcagcatccacatcggttttgccagcattcccagcaggactttcaggaacgtctgaaaatagagtttcataccgcacctccctgcaatgccagccgtttcggtaaccggttacggacaaaaaaggcattggctaccggataaatcagcaataatgcacagacatacagaatatgcagcagcgacacttcgcgcaggaagatatcaaacatcgcattgagtgcgtgagtcagcggctcaaggttagagataatcctggccggcaggatcatcgacagctccggcaccgccatgccggaaaacgccatggcgatactgaccagcataccaatcatactgtaagccatcagcgcattgctggtgaatgtgtaaagcagcaggccgatactctgtgccgccatgacataaaagaagccgataaacagcatatacagcgggttacctgccaccttggcgccggaaaacgtcaccagggcagccagttccaccatcagcagagcggtaaaaaacagggtatacggtgccagtttccccagaacaccactgaacagcggtttaagcgtcagcagcatggtaccgcgcgacatactgtaaatagtcagcgtgacaacaaataactgaagcatatggatggtggcggcaaactgctgataataaatataactgccgctggcattgaacaggctgtcgtatgacatcgtcacctgtgccagtttcggcagcgtcttgcccgtttctgacgcgaggacagtgcggtactgtgcattcagttctgctatcagcccgctgaaatcctgaatcgcatagctgccggaggcataaaataacccgttgtaatacatccggactgtcggctgctttccggccagcacatcactttcaaaacgtttcgggatcatcaggatcgcgtaatcttccgcactgcccatccgctccagtgctgccgaaggatcatcccgcggcgtgatactggcgtgtgaagcagcgttcagattgcgcaccagcgtccgcgagagcggactgtggtcataatccaccgcagagaccggcagattcagcagtgttccctctgaaaagttcgcgctgatcagtgtgaataagatcagcggaaataaccagctcagccagtggaacaccgggctgcggatagccatccgggtttcctgtgtgaaggcgtggcgaaagctgtaccagataaccggtattctcatcgtgacaccttacttatcccggcgccacagtgcactcatgccgggtcttaacccgtccacaggttgtgccggatagagacgcacctcaaaggttttcagatcaaaatccccggtggcacgggtggcgcgtttggtggcgtaatcccccatcggggcgatatagcggacttctgcctcaatttcctgatttttcagtgccggtaccgtcagggtgattttgtcgccttttttcacatccgcgagaatatcctcacgcaggttatagacaaaatacgcttccggcaggcggataatcgttaccagcggactgcctgcattaaacagctccccgatttcagccggaaccggcccgatctccccggtcaccggcgcggtaactgttagttcatcctgctggacttttaattccgccagtttctgttctgcctggcgaagtgccgcttcgtaacgctgacgctgctcggtgcggtcgccgtttttcgcctggtcgagctgagctttggcggccagtacaccctgctgcgccacatcacgggcacggcgggactgatcaagctcggtttttgacacataacctctaccggccatgctgctcatgcgctgaaaatcacgctgtgcattcgccagctcagcctgagacttcgccagctgtgcagcatagttgcgcacgctctcttcccgcgtgccgttcagggactcggttaactgcgcctgagcctgatcgcgggcagccaccaacgaggcgacctgtgcttccagctccgggctggtcaggcgaatcagcgcctgtccctgtttaacgtcgtcaccgcgctcaatcagacgctcaacaacacgtcctttggctttcgaggagacaataacctccggtgcatcgacttcaccctgtaataaaagatactggttgtgggcacgaaaaagtgcagccatcgcaattaagaccagcatcagcaggatcagatagattgttctttttttcattcttgatttcggccttaactatcacttgtgaaactattcgaaatggaatcatcccgaatgaaattgttctggataaaacgatgaagaaaggggaaggtttcagtatcactgatttcagctgaaaccgttaagatatttgtgcgccagatcacagcataataccttcaatcttagcctcacacacctgttacacaactatttttaatataaaatctcagatagttacaaataattctcctccggcaagtgatccgacagaaaaatgtatgactacaacctgattttcctgctgcttcagcagatgtgtgtgtacctggttatcgcctgggtgctcagcaaaacgccgctggtgctgccggtcttacaggtgactgtccgcctgccgcacaagctgatgtgctacctgattttctccgttttctgtgtcatgggcacctatttcggactgaatatcaatgattccatcgccaacacacgggctatcggctccgtactcggcgggttgctcggcggaccgtctgtcgggctgctggtcggttttaccggcgggctgcaccgctattctctcggcgggatgacggcgttcagttgtatggtgtccactattgtcgaggggcttatcggcggcctggttcaccgctactatatgaagcgcgggcagatcaacaaactgtttaatccctggacagcggccggtgtgacctttgttgccgaactggcgcagatggcgattattctgttactggcacggccgtttaatgaagcgctgaatctggtgaaagatattgccgcaccgatgattatcgccaataccatcggtgccgctatgtttatccgtatcctgctggacagacgcgctatctttgaaaaatacaccagtgccttttccgcccaggcattgaaactggcgatcagtacagacggcgtgctgcgccagggatttaacgagaccaacagccgccaggtggcacaggtgctgtatgatgagctgaatgtcgccgccgtggctatcacggatacggaaaaactgctggcgtttatcggtgtcggggcggatcaccatctgccgggcacgccgattgcctcgcgttactcccggcaggccattgcccataatgaagtggtctatgccgacggcaacgaaacaccgtactgctgttcgatcaatccgcactgtaaactcggctctacgctggttatcccgctgaccggggagaataagcaggtggtcggtaccatcaagctgtatgaggtgaagaaccgcctgttcagctccattaaccgcacgctgggagaagggattgccagcctgttgtcagctcagattctggccgggcagtttgagcgaactaagcagtcactactggaaacagaggtaaaattgctgcatgcccaggtaaacccgcattttctgtttaatgccctcaataccttacaggcagtgatccgccgcgatgcggaacaggcacggcatctggtgcagaatctctccacctttttccgtaaaaatttaaaacggccgggggagatagccactctcgcggccgaaattgagcatgtgaatgcttacttacagattgaaaaagcccgcttccgtgaacaactcagtgtggatatcgccattccggatgcgctgaaacaagccagtctgccggtcttttcgttacagcccattgtggaaaatgcgataaaacatggtacatcacagatatttgagcagggaaaaattaccataagcgcacgggcggagggcaatacgcttgtcatcctgattgccgataacgccgggctgtatcagccgaccgggatgagtgacgggctcggcatggggctggtcgataaacgcatcaaagtccgctatggtaaacaatacggcctcagtgttcactgcgagccggaagtaaaaacgaccattattctgaccttacccttcgactcaccggcaggtgcggcagcaccgcctgataactaaaaaaatgataatgacacaatgaatgttttaattgttgatgatgagccactggcccgggaaaacctgcgattactgctcgatgcgtatcctgacatccatatcctgggtgaatgcaccaacgccattgatgctatcggaaaaattcaccgcctgaagccggacgtggtgtttctggatatccagatgccccgtgtcaccgggctggaaatggttggtatgctcgatcccggccaccggcctgcgattgtctttctcaccgcctttgaagagtacgccttacaggcttttgaggaggatgcgtttgattatctgctcaaaccggtggaaaaagagcgcctggacaaaaccctgaaccggctgcgccaggggcagatccgcccggcggagaccccggaacagacagagcaactgcgctatatcccgtgcagcgggcacaaccgtatctggctgatgccggttgaggatgtggtgtatgtcaattcccgtatcagcggcgtgtttgtgatgagcgcgcacggccaggaaggatttaccgagctgacactgcgcactctggaaacccgtaccccgctgctgcgctgccaccggcagtatctggtcaatctgacccgtctgcgggaaatcctgctgggcgataacggccaggccgagctgatcctgagtaacgatgaaaccattccggtcagccgccgctacctcagacccctgaaggaagcgctggggctgatttaataccaaaatccggacgcataaaaaaagcccggcagggatatccccggccgggctttttatgattcagagaatcaattatgcatcattattgctacgacgacgtggtgcggagtttccgccttcttcgcggcggaagctgcggcgctcgccctgcggacggcgatcgctgttgccacggtcagaacgctcaccgtcacggcggttaccaccaccgaaactgcggccaccgttaccaccacggtcattaccaccgctgcggcgttcacggttgaacggcttcgcatcaccgactaatgtcatgttcattggtttgttcatcacacgggtacgggtgaagtgctgtaacaggtcagtcggcatacctttcggtaattcgatagttgagtgagtatcaaacagtttgatgttaccgatgtaacggctgttgatatcaccttcgttagcaatcgcgcccacaatgtgacggacttcaacaccatcggtacggcccacttcaatgcggtacagttccatatcacccacgtcacggcgttcacggcgcggacgatcaccacgctcagggcgatcaccgaaacggtcgttgcgatcattgcggcggcgatcatcacgatcattgaactcacggcgcggacggcgtggtgcatccggtggcaggatcagtttgcgctcaccttctgccattttcagcagaacagcagccagagtttccatatcgatatctgcgtcagactcatcgctgtctgccggaaccagttttttcagcagtgcacggtactgatccaggttgctgctttccatttctgcatggatagtggcagcgaatttttcctggcggcgctggctgatcatctctgcatccggtaattctacctcagggatggtcagtttcatggtgcgttcaatgttgcgcagcaggcggcgttcgcggttttcaacgaacagcagagcgcggccggcgcggcccgcacgaccggtacggccgatacggtgaacataagattccgcatccatcgggatatcgtagttaacaaccaggctgatacgctcaacatccagaccacgggctgcaacgtctgttgcaatcaggatatccagacgaccatctttcaggcgctccagcgtctgctcacgcagtgcctggttcatgtcaccgttcagtgcagcgctgttgtagccgttacgctccagggtttctgccacttccagggtcgcgtttttggtacggacgaagataatcgccgcatcaaaatcttccgcttccaggaaacggaccagtgcttcgctcttacgtgcgccgtaagcagtccagtagctctggctgatgtccggacgggtggtgacgctggtctgaatgcgcacttcctgcggatctttcatgaaacgacgggtaatgcggcggatagcttccggcatagttgcagagaacagtgctgtctggtgctctgccgggatctgactcatgatggtttcaacgtcttcgatgaagcccatacgcagcatttcatctgcttcgtccagtaccagacctttcaggttggataaatccagggtgccgcgttttaagtgatccagcagacggcccggagtcccgacaaccacctgtggcccctgacgcagagcacgtaactggacgtcataacgctgaccgccgtacagggcgaccacattcacgttacgcatatgtttggagaaatcagtacaggcttccgcaacctggaccgctaattcgcgggtcggtgccagcaccagaatctgtggtgctctcaggttcggatcaatattgttcagtaacggcaggccgaatgccgccgttttaccactacctgtctgtgccatacccaggacatcacgtccggcaagcaggtgcggaatacattgttgctggatcggggacggcttttcgtagcccaggtcgtccagtgcagtcaaaatatcagctgataaaccaatgtcagcaaaagagatttcagtctcagtggtcatgtaaaggtgcctcatacaaaatggcggccagtctacacaacccatcggaaagcatgtcggttgttttcatttaaaagtgtgaactggctcaaataaaattataaaacgaacaaaacatccccccatcactttcgcgatggtgaaaaattaacggtttgaagtgtgttcgtcagctattgtggatctgaatccgtcaggtcctgttcttcatcacctaacagagctaattccaacaatgcgtagcggtgctcaacgaaattgtgtgcgttgttggcaaccgtcagcttgaacagcgtttcagcgctgtccgtatcccccagactcaggtagtatttacctaaatagaagtaggtttcactgagatgttcagcgagcgaagtgttatccgttgagaattccttcagccgatcaagcagtgtcttttcactgatgtcgccgagatagaattcagcaatattccagccccattgtccgcctttcgcctgctgatagcgctgacgtaaatcggtcagtgctttcttcggatctatctctttatcgacgagataaagccacagcgagcggaacggatcgtttggatcatcctgataaaacgccagcaaatcatcccgcgccaccggataccggcccccgtaatacagggcaataccgcggttcatacgcgcgtagttataagttggatcaagctctaatacagaatcatacgcttcataggcagcatcaaagttgcctgcctgcgtaaaataaatgcccaggtaattaaatatctccggaatatccggacgcattgataacgcaacagtaaaatcgttacgtgccaatgcacgcaatccgaggctgtcgtacaacacaccacgctgataaagcagctgggcgtactcgtcctcagttaatgaccggcttgccagtatttgttccattcgggcgaggatcacttcctgctgtaatgatggttgcaggggtactgcaagtaaatccccggagtgccagtttttaccgctgctgcatcctgcgataaaaattatagctgcaatgctccaccaacgcagaaaaaaattcatttcctactcccgaagtcagatccctgaaaggataatcctctgactgacaataaccgagtgcattttgctttttttgccgaatggcgccctttttacaggacgccacgacttacgtcaaattttattcagcgttatttgcatcaggggttgcatccgaagccggagctgcatcctgactgactgcttctttcatgctcaggcggatacgaccctgacggtcgatttccagtaccttgaccggtacttcctgacccatttccagataatctgatactttttcaacgcgtttgtcagcgatctgagaaatatgcaccagaccttctttaccgccgccgatagccacgaaagcaccgaagtcaacgatacggacaactttaccgttatagatacggccgacttccacttctgcggtgatttcttcgatacggcggatagccatcttcgctttatcgccgtcagttgcagcaatcttcacagtaccgtcatcttcgatttcgatagtggtgccggtttcttcggtcagggcacggatcacagaaccgcctttaccgataacgtctttgattttgtccgggttgatgcggatggtgtgaatgcgcggtgcaaattcagagatatcagcacgtggtgagttgatagcctgttccatcacgcccaggatgtgcagacgcgcacctttggcctggttcagagccacctgcatgatttcgctggtgataccttcgattttgatatccatctgcagggcgctgataccgtcacggctgcccgcaactttaaagtccatgtcgccgaggtggtcttcatcaccgaggatatcagacagaaccacaaatttgtcgtcttctttcaccagacccatcgcgataccggcaaccgctgatttcacaggaacacctgcatccatcagtgccagagatgcaccacagactgacgccatagaagaagaaccattggattcagtgatttctgaaaccacacgcacggtgtacgggaattcttcctgggatggcatcactgccagcacaccacgtttcgccagacggccgtggccgatttcacgacgcttcggtgaaccgaccataccggtttcacccacgcagtacggagggaagttgtagtggaacaggaaggtgtcagtgatttcacccattacctgatccagagtctgtgcatcacgggcagtacccagcgttgctgttaccagcgcctgagtttcaccacgggtgaacagagaagaaccgtgagtacgcggcagaacaccggtgcggacatccagtgcgcggaccatgtctttttcacggccgtcgatacgcggctcgccgttcagaacacgggtacggacaacagatttctcaaccgcagccaggatgtcgctgatttcatgtttcagttcgccggtcagctcttcgccgcgtgcggcaaattcagcttccagtgcactgatggttgcatctttaatgatatcaacctgtgcgtaacgatcctgtttctcagtgatacggtaagcatcacccagcgctttttcagacagttcagcaacgcggtcacgcagagtctggttaacaggctcaggctgccagtcccacttcggcttaccggcttcagcggccagtgcgttgatgttttcgataacaatctgctgctgctcgtgaccgaacacgaccgcacccagcatttgttcttcggtcagcagctgtgcttctgattcaaccatcagaaccgcacctttggtaccggcaacaaccagatccagtttgcttaccgctaattcgtcagtggtcgggttcagaacatactggtcattgatgaaaccaacacgtgccgcaccaatcgggccgttgaacggaatacctgacagtgccagcgccgctgaggcaccaatcattgccacgatatcagggttaacctgcgggttcacagacaccacggttgcgataatctgaacttcgttcaggaaaccttccgggaacagcggacgtaacggacggtcaatcagacgtgcgatcagggtttcgccttcgcccggacggccttcacggcggaagaagctccccggaatacggccggcagcgtaagtacgctcctgatagtttacggtcagcgggaagaagtcctggcccggtttcatttttttctggccgacaacggtaacgaataccgcggtgtcgtccatgttaaccattacagctgctgtcgcctgacgggccatcatgccggtttcgatagtgacagtgtgctgaccatactggaatttacggattgtcggatttaacaaaataatatccttctgggtctctcaccccggcaggggtaagtagtgaaatggttccttcagatacatcctcgcgactaatgacaaccttttcctgctgccggaaagtgctctcattagccgcgcgaatagctgtaccgaagaatcgttattattgcggcaacagctcagtgtgccgcattcagaagaaaaggggccgtcggcccctttccactgaaacttgtctgaattagcgacgcaggcccagacgctcaagaattgaggtatagcttgctaagtctttgcctttcagatagttcaggagcttacgacgctgagcaaccatacgcagcagaccacgacggctgtggtgatcttttttgtgctctgcaaagtgaccctgcaggtggttgatctgtgcagtcagcagcgcgatctgaacttcgcttgaaccggtgtcgttttcgccacgaccgaaatcagcgacaattttcgctttcgcttcagtgcttagagacataatagaactccaaatatactttgattaataaaaatgagtgccgatctctaattcagcatctcagggaaattgccgcgttattctacgccgcctgcgccctgaacgcaagatgcggcaatgcttattccgtgtattccacaacaagacggcgcggtgccaccagcccgtcctcactgatcaccgcaaggccgataaaggcggcatcatcaccctgcgttacgcgggttaatgtctccggtgccaggtcatgcggagcccgtaccggctgccccagcttaaaatacccggcagtcacgtccgtcagattgacctgcgggaaatgtgacacggcggtatccatcggcagcaacagcggatccagtgcggtttcgagcggagtttcagcctcatccgccacacggcgcatttcctgaagctgttccagtgtcaccatccgttctgccggatacgtggccacctgcagccggcgcagcatagtcacgtgagcaccgcaaccgagtttctcaccgagatcatcaatgatagtgcggatataggtgcctttcgagcagtgaatttccagctccagctcttccccttcatggcggataaacagcagttcatacaccgtgatcgggcgggcttcccgctctatggtgatgcctttgcgggcatactcatacagcggacgtccctgatgcttgagcgcggaatacatggacggtacctgtaaggtatcgcccctgaatgactccagggcagccgcaagctgttccgccgtgaatgacagcgggcgctcactgatcacctcaccctgtgagtctgaggtgtccgtacgctgccccaggcgggcaatcacgcggtaacgtttgtcggaatccagcaggaactgtgaaaacttggttgcttcaccgaggcagaccggcagcataccggtcgccagcggatccagcgcgccggtgtgaccggccttggcggcattaaacagacggcggaccttctgcaatgcatcattggatgaaatgtcctgcggtttatccagcaggacaatgccgttgatattacggccacgacgacggcgtgccatcagttaccctctttgtcgtccgcagatttacgcatatcctggtcgtgtttgatcacatcagacaccaggttagacatacgcatcccttcgaccagagagctgtcatattcaaatttgagttccggaataatgcgcaggcgcatctctttccccagcagggaacgaatgtagccggaaatatcatttaagactttgatgcctgttttcacctgctctgaattatggtcttcatccataaagttcagaaaggtgacaaataccgtggcataggccatatcgcgggataaatccacgccggataccgttgccatccccacacggggatctttaatttcacgctgcaggataatcgcaatttctttctgaatttcctgtgaaacgcgctgagtacggctgaattctctcgccatagtttctctcctgaaaatcaggggggccataagccccccaattatatcatgttatgtcataccgtcaggtgatcagatagttcgctgaacttcaatcacctggaagacttcaatcatgtctcccgggcggacatcattgtagttcttgacaccgataccacattccatcccgttacggacttcagcaacgtcatctttgaagcggcgcagagattccagctcaccttcatagataaccacgttgtcacgcagaacgcggatagggttattacgtttgatagttccttccgtcaccatacaaccggcgatggcaccgaatttcggtgaacggaacacatcacggacttctgccagacccatgatttcctgtttgaattccggcgccagcatcccgctcattgcctgtttgatttcatcaatcaggctgtagattacggaatagtaacgcaggtcaacgctttcgctttcaatcaggcggcgcgctgatgcatccgcacggacgttaaagccgaggataatcgcgttggatgccgcagccagcgtggcgtcagtttcagtgataccacccacaccggaaccgatgattttcactttgacttcatcagttgacagtttcatcagtgaatcggtgatagcttcacaggtaccctgcacatcagtcttcagaacgatgttcagttcagaaaccttaccgctttccatgttagcaaacatgttttccagtttggctttctgctggcgtgccagtttcacatcacggaatttaccctgacgatagagtgccacttcacgggctttcttctcgtcacggacaacggtcgcttcatcaccggcagacggtacgttggacagacccaggatttccaccggaatggacggacccgcttcggtgatatcctgacccagttcgttacgcatcgcacggatacggccgtattcaaagccgcacagcacgatatcgcctttgttcagtgtaccgctctgtaccaggatagtggcgaccggaccacggcctttatcgaggtaagattcgataaccacaccgctcgccataccggcacgcactgctttcagttcaagaacttcagcctgcagcaggatagcatcgagcagatcgtcgataccgatacctttcttcgcggaaacgctgatgaactgagtctcaccgccccactcttcagagaggatgccgtactgagacagttcgttacgtacgcgatccggatcggcttccggtttatcaattttgttcaccgcaaccacaaccggcacacccgctgctttcgcatgctggatagcttcgatagtctgcggcatcacgccatcgtccgctgcgacaaccagaacaacgatatccgttgcctgcgcaccacgggcacgcatggaggtaaacgcggcgtgtcccggagtatccaggaacgtgatagcgcctttatcggtggtcacatggtaagcaccgatgtgctgggtaataccgcccgcttcgccggaggcgactttggtggaacggatatagtccagtaaagaggttttaccgtggtcaacgtgacccatgatggtcacaaccggcgcacgtggttcagcctgtgcttcacccatgtcacggtcgttcaggatcgcttcttccagctcgttctcacggcgcaggataactttgtgacccatttcctcggcaaccagctgtgcggtttcctggtcaatcacctggttgatagtcgccatagcgcccatcttcatcatggttttaatgacctgagaaccttttaccgccatcttgttggctaattcaccaacagtgatggtttcaccgataaccacatcacgggtaaccgctgcaaccggcttgttaaagctctgctgcagtgagctgcctttacgctgtttcttaccgcgaggcagttgcgcacgggcttcttcgcgatcggctttctcagagtgacggttgtttttcttctggcggacgtttttcgcgccacggccgcggccgcggttatcaccttcaactttcgcatcactttcatcttccgcttcacgggcgtgagcagaggtggtggtgtgatagtccgcgctttctgtttcttcactgacaggagcagaccatttctcgccgttttcttcggccagacggcgcgcttcttcagctgcacgtttcacttcagcttcaagtttgcgctgctgttcttcttcagctttgcgtttgatttcagcggcttcggcttcgcggcgcactttttcgctgttttcccgggtatcagccggggctgatttcgctttattttctttcacgttattcttttccgctgcttcacgcttagccggttctgccgcttgttcagttactttcgctgctgccgcttcgcgttttgccttttcttcagcctcacgtttggcttgcgcctcttgtctggctttttcttcggcttcacgacgggcctgctcttcagcttcgcgtcttgcctgctcttccgcttcacgctgtgcctgctcttccgcggcttttgcctgttcagcggcatcgcggtttacatatgtgcgttttttgcggacttcaatattaaccgatttgctcttgccaccggttaccggaacactcagcgtactgcgagttttgcgctgaagtgttaatttacccggctgacttgccccgccctgttcgcggttcagatgggccagcagggcctctttttcttgctgggaaacgttatcagacgccgtttttttgatgccggcatcagcaaactgctgtaccaggcgctctacggaagtctgaatttcgtctgccagtgattttaccgattctgtcatgctgctccttcccgctacaaattaagatgcatcgtcgccaaaccaacagatattacgcgctgccatgatgagttcacctgctttctcatcattcagaccttcgatatccgtgaggtcatcgataccctgctctgcgagatcttcaagggtacaaataccacgggaagccagggtgaatgccagtgtgcggtccatgccttcaaggtttaacaaatcatccgccggtgtggtacctgactggctctctttctgtgccagttcgagcgttgttaaagcggcttttgcacgttcgcgcaggacttcaacggtttcctcttcgaggccgtcgatttccagaagttcgctgaccggcacatacgccagttcttccagtgtggagaaaccttcttccactaataaggttgcgaaatcttcatcgatgtcgagatgcttaacaaaagtttcaatggaagcgtgtgcttccgcctggtgtttcgcgttaagttcctccgcggtcatgacgttcagttcccatttgtcatcaccacgatgttttttcagcagttgtgcagcgagacgcacattctggccgttacggccaatggcctgtgcaaggttgctgctttccacagcaacgtccattgtgcatttgtcttcatcgacaacaatggatgcaacatctgccggagccattgcattaatcacgaattgcgccgggttgtcatcccacaacacgatatcaatccgctcgccgcccagctcaccggaaacggcctgaacgcgggcgccgcgcattcccacacatgccccgacagggtcgatgcgtttgtcattggtcttcaccgcgattttcgcacgggaaccgggatcacgggcagccgctttaatttcaataatctcttcgccgatttccggcacttcgattttaaataattcgaccagcatttccggacgggaacgggtcacaaataattgtgccccacgggcttccggacgaacatcatacagaactccgcggatacggtcacccggacggaaattctcacgcggcagcatatcttcgcgcataatgactgcttccgcattattccccagatcgagggtaatgttttcgcggttcacttttttcaccacaccggtgatgatttcgccctgctgctcgcggaactgatcaaccaccatcgcacgctcagcttcgcgtactttctgtacgataacctgttttgcggtctgagtggtgatacggtcgaaggtgacagattcaatctgatcttcgatatattcgcctaactgaatgcccggcgtttcataatcagccgcttccagtgtgatttcacgggtcggctgagtgacttcttctaccaccatccagcggcggaaggtatcaaaatcaccggatttacggtcgatttccacacgaacatcaatttcctgttcgtattttttcttagtggcggttgccagcgcagtttccagagcctcaaaaattttctcacgaggaagcgatttttcgttagaaactgcctcaacaacagccagaatttctttattcatcctagttgcctcttttgaactttatattaaaagtggggtaccaggttagctttctggatgttgccaagtgcgaacacttcgtctttgccatccactgtaaccgtgatcatttcaccgtcgacggctttgataataccctgccatctgcgacggttctgcattgcgattcgtaaagtcagtgagacttcctcaccggtaaaccgctgataatgttcagccgtaaataacggacgctccatacccggagacgaaacctcaaggttataaacggttgtaataggatcttcaacatcaagaacggcactgacctggtggctcacgtccgcgcaatcatcaacagtgataccctcttcactatcaataaaaatacgcagtgttgacacgcggccgcggataaactccacgccgacaagctcaaaaccgagtgcttcgacaggtgcagtgaccatctctgttaatttctgctctaatgtggacaagaccacccccgggacataaaaaaagggcataacgcccagtatctctgttgactgataacaaaaaaccccgaaatttcggggctttatgcaactggaccctgtgtacatcacacttcttaatcttttttccaaatcagggataacgtaagagttgttgatacaatcaacattggaaaaaacgatttgttataagaagtggttgcgggagccggatttgaaccgacgaccttcgggttatgagcccgacgagctaccatgctgctccatcccgcgttcgaaacgtgaaaaattctacgctgatcacctgcaaaacgcaagtgtgaaactaaatggtgccgaggacgggacttgaacccgtacgcccgttttgtaggcactaccacctcaaggtagcgtgtataccaatttcaccacctcggcactgaactgctcttttttacggaactgactgatggtgtgtatcaatcccgtttaaaacttttacttcagacttgcaacaatcagcgcggaatatcgctgttaggagctgctggtgctgcgggaacatctgttttctgttctgtctgcaccggctgagcgagattatcaaacttgctgcctgtaccggttttattgctggtcatgttgcccagaaccaaactcagtacaaaaaacagtgttgctaaaatgcctgtggtacgggtcatgaagttacctgaacccgaagaaccaaacagtgttgcagacgcgcctgcaccgaacgaagcacccatgtccgcacctttcccctgctgcattaagatcatgcctactaaggcaatcgcaacaagtaagaaaacgactaagagagctgtatacataaacgtgtacctattcctcgtacggtataccgactgattcggtatcaatctgcacactcacagataaacctaattaccttgctgagcgggtcagaatactaaccaaacaaacgcgcacgcgcaagtctattttaagccaggcgcaccggttgcggaaaaaaacaacaataaggggcggattctgacagagccggggggaaaccgcaataattttttccggctctgtcattcacatcataaataattatacgcgtttcaccgcgtctgcaatgcggtttgccattgcagtgacctgcgcttcatcttccccttccaccatcacacggatcagcggttcggtaccggatttacgcagcagcacacggcctttgccgttcagctctttttccacttcctgtgccacgcgggtgacttcctcgcttgtcagcgggtcgtgctgaccggcaaagcggacattcaccagcacctgcggcagcagtttcatgccgctgcacaggtcgtgcaggctcatgttgttgcgcaccatcgcactcagcacctgaagacccgccacaatgccgtcaccggtggttgttttgtccagcaggatgatgtgaccggagttttccgcacccagacgccagcctttttcctggagtttttcgagcacgtaacggtcgccgactttcgcgcgctcaaacggaatacccagctgtttcagtgccagctccagccccatgttactcatcagtgtgccgacagcaccaccgcgcagttgtccctggcgcagtgcttcgcgggcaatgataaacaggatctggtcaccgtccactttttcacccaggtgatccaccatgatcaggcggtcgccgtcaccgtcaaatgccaggccgacatctgcgccttcagccagaacacgttcctgtaactgacggacatccgttgcaccgcatttttcgttaatgttgataccgttcggatcacagccgatagcaatcacttccgcacccagttcacttaatacgttcggtgcgatgtgataggttgcgccgtgtgcgcagtcgatcaccattttcagcccgttcaggctctgctcgttcgggaatgtccctttacagaattcgatgtaacggccggcagcatccacaatacggtttgcacggcccagttcggcggattccacacaggtcagtggtttttccatctcggcttcaatcgcttcttccacgtgatcaggcagcttggtgccgtcgatggagaagaatttgatgccattgtcataatacgggttatgagaggcggaaataacaataccggcctcagcacggaaagtacgggtcagataagcgaccgccggtgtcggcatcgggccggtaaatgaggcggataaccctgcggcggcaagaccggcttccagtgcggattccagcatatagccggaaatacgggtatctttaccgataataattttacgtgagccgtgacgtgccagcactttcccggctgcccagcccagtttgagcacaaaatcaggggtaatcgggctgtcacccacttttccgcggatgccatcagtaccaaagtatttgcgatcactcattgtcgtttgtttccttcgctaaacgggttgcttccaccactttcatggcctggacagtttctttcacatcatgaacacggataatctgcgcacctttcatcgcggcaatcactgcacaggccacgctgccggcaacccgttcatccgggggaatatccatcagctggccaatcatagattttcgtgacattccggcgagaaccggtaatcccaggttatgaaacaggtctaatttatccaataactgataattatgcgccagtgtttttccgaaaccgaagcccggatcgagaattatgtgatttttttcaattccggccgccacacaacgtgccacctgcgcttcaagatacgtatacacctcgcgtaccacattctgatagtgcggtgcctgctgcatggtacgcggttctccctgcatatgcatcacacaaaccggcaggccgctctgtgccgctgcctgtaatgcccccggctcactgaatgagcggatatcattgagaatatgagcccctgcatttgcggcttcgcggatcaccagcgcttttgaggtatccactgaaatccagacatccgactcacgggcaatcgctgccacaaccgggataacccgctccgcttcctgctcagggctgacttctgctgctccgggacgggtggattcaccgccgatatcaataatcgtcgcgccttccgcaatcattttccgggcatgttccagtgctttggcgggggtgttgtgtgtaccgccgtctgagaatgaatccggggtcacattgaggatccccatcacctgcggcgttgccagcgaaagtgtctgaccgcgtgcggtaagtttcataatccggccttcttactgtttattatttcaatcgtgaggtgattgtaatgcctgactcctgcgggataaagatataaaaaaacccggcagattttccgccgggtttttcatattactgcttcatacaactgaatgatgaattatgactgcttgttgtcgtcttcagacggcgcagcattgttgtcatctgatgattcaggtgcttcctgaaccggaacctggttactgctttccggcggacgggtatccgctttcggcttgtcaccttcccagcccgcaggttcacggaccggcacacggttcatcagatcatcaatctgtggtgcatcaatggtttcatatttcattaatgcatctttcatggtgtgcaggatatccaggttatccatcaggatctgacgcgcacgtttgtagttgcgctcaataatcccgcggatttcctcatcgatagtccgggcagtttcatcagacatgtgctgtgcttttgacacagaacggcctaagaacacttcaccgtcttcatccgcatacagtaacggccccagtttttcagagaagccccactgcgtcaccatgttacgggcaatgttagttgccactttgatgtcgttggatgcgcctgtggacacattttccggcccgtagataatctcttccgccagacggccgccatacagggtggagatctgactttcaagtttctgacggctggcgctgatctgatccccttccggtaagaagaaggtcacacccagtgcacgtccgcgcggaataatggtcactttgtgtaccgggtcatgctccggcaccagacgaccgatgatagcgtgaccggcttcatggtaggcagtcgaggctttctgctcttctgtcatcaccatagagcggcgttccgcacccatcatgattttatcttttgctttttcgaactcgaccatggtcacaacgcgtttattaccgcgtgccgcaaacagcgcagcttcgttcaccaggttggcgagatccgcaccggagaagcccggtgtaccacgtgccagcacagacggttcaacgtccggcgataacggcacacggcgcatatgcactttcaggatttgctcacgtccgcgcacatccggcagaccgaccacgacctgacggtcgaaacggcccggacgcagtaacgcagggtcaagcacatccggacggttggttgccgcgataacgataataccttcgttaccttcgaaaccatccatctcaaccagcatctggttcagtgtctgctcacgttcatcgtgaccaccgcccagacccgcaccacgctgacggccgacggcgtcgatttcatcgataaagatgatacatggcgctgctttcttcgcctgttcgaacatatcacggacacgggacgcacccacacccacgaacatttcgacgaagtcagaaccggaaatggtgaagaacggtactttcgcctcaccggcaatcgcttttgccagcaacgttttaccggtacccggaggccccaccatcagaatacctttcggaattttaccgccgagtttctggaagcggctcggctcacgcagatactccaccagctcaccaacttcttctttggcctcatcacaaccggccacatccgcaaaggtggttttgatctgatcttcggtcagcatgcgtgccttacttttaccgaaggacatcgcacctttaccgccgccgccctgcatctggcgcatgaagaagatccagacaccgattaacagcagcatcgggaaccaggaaatgaaaatggttgtcaggatacccggctcttccggtggttcaccgaccacagtgacgtttttgttcagcatggtgttaagcagctgattgtcctgcatcggcaggtacgtcgtgtatttggagccgtcttttttactgacgttaagatcacgattggaaatacggacttcgcgcacctgatcctgtgctaactcagtgatgaaggtagagtagtccaccttacgactgtttgaatcgcctgggccaaaactctggaacaacgacatcagcactaccgcgatgaccagccagagaattaggtttttcgccatgtcactcaagggattaacctcttattacatctgtgttaacaaataacgcacagggtactacactttccaccctgtcgctacaatgtatacttcacgcgatcgggcccgcgaagcatcgggtttacggattttcactttcgtgaacagggaacgaacctcccggaggtactcgtcaaagccatctccctgaaagactttaacaataaaactgccccccggtgccagaacagaacggcacatatcaagtgccagctcaaccagatacatcgcgcgcggaatatcaacagccggagttccgctcatatttggtgccatgtctgacataacaacctggacttttttatctcccacgcgccccagcagagctttcagcacgttttcgtcacggaaatcgccctgaaggaaatccacgccgacgatgggatccatcggtaacaggtcacaggcaataacgcgcccggactgaccgatgtgattaacagcatattgtgaccagccgccgggtgcagcacccagatccacaatagtcatgcccggtctgaaaatattatcgccctgctgaatttcttcgagcttaaaccaggcacgagagcgaagcccctttttttgcgccatctgaacatatttatcactaaaatgttcctgtaaccagcgcccggagcttgctgaacgttttttattggccattgtgttttccgactaacctgttatttctgactcagttttttcgcataaccggacgaaaagtcccgttaccgcagacagtactcctcacctaatgatggtgataagcatgatatggcggtagaatacaccgttttcaatagttattaagcaaaaaaaacgatgaacctcactaaaaaacaagtccagcacctgaaagcactcgctcatcatctgaacccggttgtcatgattggcaacaacggtctgactgaaggcgtactcgcagaaactgaagtggctcttacacatcatgagcttatcaaagttaaaatcgcgggcgaagaccgtgaaatgaaaaccttgattgcagatgcgattgtgcgtgaaaccggtgcttacaatgtgcagattatcggtaaaattctggtgctctaccgtccgtcggaagcccggaagatcattttacctaaatgataattgcatatttataaaaaaatgccaccggcagatgatttctgacgatatcgtccggccggtggcattcctttcagattttcttcatatccgggccgcctcagtgctctgccacccgaatgtaaagttcagtaaaaacgcctttcactgcatttttctgatgaaatatccgtattgtgctgtttttttacgacgcagcttacaggtattccacattgatgacttcatactcaacttcaccgcccggtgtctggatgacaaccacgtcgtcaacctctttaccgataaggccgcgggcaatcggagagttcactgacagcaggtttgatttgatatcagcctcatcatcacccacgatgcggtaagtctgctcttcatccgttgcgacgttaaaaacggtaacagtcgcaccgaaaataatccggccattgttggtcattttggtgacatcaatcacctgcgcattggagagcttggcttcgatctcctgaatacggccttcacagaaaccctgctgctcacgggcggcgtgatattctgcgttttctttcagatcgccgtgctcgcgggcttccgcgatatcagcgataattttcggacggcgctcatttttgagaaattctaattcttcacgcagttggtctgcgccgcgtaccgtcatagggatttgtttcattctctacctctgaatcattcctaagtaatagtcatatcatcctgattaaacgataacagtaccttatgcgccatgtgtggcacactactattaagtaaaaccgtgtaaatctgcgctgatacggccatcgcactgcggatgctgtcagcgcggttgacgcgttatccgcgcgggctgaactgagatcctgtcccggtattctatcccggagcgcaatgcgggtcatcgtttacttttaccggtccgtggctttagtataacgggctctcacccccgattgtgatggataggtcgctcaatgaatgtttttacccggctcgcatatgcgatgggattgtcagtattactggctgcaggtgcagcagccaccccggtcgaacaatatacccaatatctgcccgccggtacaaacctggcgatgattgcgcagcgggtgggcgattctcagccaatcgtggaatatcaggggcagcagatggcgctgcccgccagtacccagaaagtggtgacggcacttgccgccctgttacagctggggccggatttccgttttaccaccagtctggaaaccaaaggacatgttgagggcactaccctgaaaggggatttaatcacccgttttaccggtgatccgaccctcacccgccagcagatccgcaatatggtcaatgaactgcgtaaagccggggtacaggccatcgacggtgatctggtgatcgatatctctgcctttgccagtcatgacaaagcgccgggctgggtgtggaatgatttaacccagtgcttcagtgccccgccgggtgctgcaatcatcgaccgtaactgcttttcagtgacgctgtacccgggggaaaaacccggcgataccgcctatatccgcacctcggagtattatccggtcaatatgttcagtgaggtcaaaaccctcgaacgcggctctgccgaagggcgtttctgtgagctggatgtggtgccgggtgaactgaaccgctataccatcaccggctgtatgaatcagcgcagcgaaccgctgccgctggcattcggtgtccagaacggcgcaagctacgccggggcgatcgtcaaaaatgaactgatccatgcagggatcaccctgagcggcaatgtccgccgtcagacccacccggaacagccgggcaccgtactgatacaaacacaatccgctccgctgcatgctctgctgaccaaaatgctgaaaaaatccgacaatatgattgccgatgaagttttccgcaccatcggccgcagctattacggcgtgccgggcacctggcgttccggccagcaggccgtccgtcaggtactgaaagaaaaagccggtattgatatgggcaataccgtaatggtggatggctccggattgtcccgtcacaatctgatcaccccggcaaccatgatggaagtgctgcaatttatagccaaacatgatgatcagctgcagtttatcaaaatgctgccgctctccggctatgacggcacactgcaataccgcggcggtctgacagaagcgggcgttaacggcaagctctccgccaaaaccggttcattacagggcgtgtataacctggccggattcctcaccaccgccagcggacagcgcattgcgttcgtgcagtttatttccgcttatgccgtcccgcctgccgagcagcgcagccgccgtgtgccgctggtccgctttgaagggcatttatataaagatttataccgtaattactgagttgctgaaaaactaacggcaataaaaaacccggcgtattcaccgggtttttctttgctcaggattctgacgattatttctgccagatgaactcgacaccttcttcgtcgtcttcatcccagtcgtcgtcccagtcatcatcgtcttctgcctgctcaagctgctctttgtggtaatcgtcccacataaagtccactttcgcgtccgcagccggtacttcggccactgcttcgcgggcatgggtgttgaggaattccatcagatcccagcacagtgctttcacgccttcgtgattaaccgcagagatcatatagaatttatcttcccagccgagtgcatccgcgatcgcctgagaacgggctttcgcttcttcaggatcaatcagatcgactttgttgaagaccagccagcgcggcttctctgccagcttctcactgtatttttccagttcgccgacaatgatcttcgcattttccaccggatcactttcatccaccgggcagatgtcgatcaggtgcagcagcacgcggcagcgttccagatgtttcaggaaacggatccccagaccggcaccgtcagatgcgccttcgatcagtcccgggatatccgcgaccacgaagctctgtgagttatccatccgcaccacacccaggctcggtaccagtgtggtgaacggatagtccgccacttttggttttgccgcagagacagaacggataaaggtggatttaccggcattcggcatccccagcatcccgacgtcagccagcagcatcagttccatcatgagttcgcgggtttcgcccggggtacccatggtgcgctgacgcggtgcacggttaacggatgatttaaagcgtgcgttacccaggccgtgaaatccgcccttggcaaccatgtgacgctgtccgtgctgcaacatgtccgccagtacctcattggtggtcatatcgcgcacacgggtgcctacaggcacgttaatcgtgatatcgttgccccgtttaccggtacagtcacgactctggccgttttgaccccgctcagcgcggaatgatttttcaaaacggtaatcaatcagggtattgaggttttcatcggcctggaggtatacatcaccgccatcgccgccgtctccgccgtctggtccgcctttcggaatatatttttcgcgacggaagctcacgcatccgttgccgccatctcctgccacaaccaggattttagcttcatctacaaatttcattacttttctccgtaacgttgccgtgtccggactaccggttcagtatgacccgggatgacgttttacgcatataaaaagccctgcaaaaggtttgcagggctttcggactcggttaagacgtgaaaaacttattcagcttcgatgctgatgaatttacggtttttcgggcctttaacttcgaatttgacttttccgtcagctaacgcgaacagagtgtggtcgcgaccgcaacctacgttgctgcctgcgtggaatttagtaccacgctgacgaacgatgatgctgcctgctaatacagcttcaccaccgaaacgttttacacccagacgttttgcttcagaatcgcgaccgtttcgagtcgagccgccagcctttttgtgtgccattgatctgctctcctattaacttaagcgataccggtaattttaacatcagtgaaccactgacggtggccctgctgtttccggctgtgtttacgacgacggaacttaacgattttaattttatcgccgcgaccgtgtgtaaccacttcagctttaattttaacaccttcaacgactggagcgccgatcttgatgtcttcaccatttgcaaccatcagaacctggtcaaactcaacagtttcacctgttgcgatgtccagcttttccaagcgaacgatttgaccttcgctgacccggtgttgtttaccaccactttggaaaaccgcgtacatattaactccgctttccgcacaccccataaaatttgattctcagagtgcactataaaattattcacaatagggcgcggattttacgcaaaaacgctgcaaatgacaagtgctgaaaacgatctaatggtaaaaaaacgtcactttacagatagccgtttatttgcagcttttttacagtacaatcataaaatataaaaaaacgctgctatcataaaccattacctttgatcgggatgtcaaaaacaaggttaaagcaagtcatatgaactcagaacaaataatcgcgctgactgcggatgatatgaccgcagtcaatcaaaagattcaaaaacagctgacctcggacgtatcgcttatcaaccagctgggttactacattatcagcggcggcgggaaacggatccgcccgatgatcgctgtactgaccggccgggctctgggctatgacggcgacaaacatattcaggtggcggctctgatcgaatttattcataccgccaccctgctgcacgacgatgtggtggatgaatccgacatgcgccgcggcaaacagacagccaacgaagtgttcggcaatgccgccagtgtgctggtcggggattttatctacacacgatcctttcagatgatgacggatctggattccatgcgtgtgctgaaactgatgtcagaagcgacaaacgtgatcgcggaaggagaagtgctgcagctgatgaactgcaacgatccggatatcagcgaagcggattacatgcaggttatctacagcaaaactgcccgcctgtttgaggctgcctcacaatctgcggcaattctggccggtgccacaccggaacaggaaaaggcccttcaggattacggccgctttctcggtaccgcgtttcagctgatcgatgatgttctggattatgatgcggataacgcgacactcggcaaaaataccggggatgatctcgacgaaggcaaaccgacgctcccgctgctccacgccatgcacaacggtaatgcggaagaatccgcgctgatccgtcaggcgattgaacagggtaacggacgtcacctgctggagcaggttcttgcaaccatgaagcgctgcggatctctggcttacacctatgcccgcgccgaagaagaagcggacaaagctatcgcagccctgtccgcactgccggactcacagtacaaagatgcactggccggcctggcccatatcgcagtccgccgctcagcctgatcattgcatgagaaaacgggatcttcacagatcccgtttttttattccggtttttcgtccggctcccggctgcccggaagctcctgtgcatcaagatgctggatcagtttagccagcccttcccgcagaatgaacgtgacaattttctcccgttcctctctggtcagctgataataggcttccacccagatcagaaacgcatcctgccgtttcgcctgatagctcgcgctgttatcacatgcatgcaggatcgcctgaacttcatccggcagactatcgatactgtattcgactgcttttccctgcacgccgcgcttgcgccgctgatgccagccttcccgtctcgccatcaggttgacaccttgaggagatgatggcaagcccgccaaaccaaccaattccttcgcggaataccattcttttttcatcttttctcctgcaacccattttcagcaaaaaatcggcaatttccgtgcttaaactgcgtgaatttgccgggcactttcctaaaaatgacaaatgctttagctacactgaatttttcaacagcttccggattcattccgattttcacgagaatattttacaaacgcaaggataaaacatcatctttttgtgaataatcggcatattttattacaataacggtaaacactgactacaatgaccaccgggcagaaaatgagatccgactcagtgctgctgctggcgtatcacgcctgataacaggtaaaaaccgcttttgtttcatcaacaaactccttatgttaagtaagtaaatatgcttacttcattcattcctttgtgttacctgcccattttcattctgtttcttaattctgtaacagagttcaaaaaagatatttttaagaaaaaatttaagaaaatatttagaaaaataatggtattttattttcttaataacgaattgggttcatctttaatgtgatggcaacccgttatttataccactaacacaacattaatctaaaataaaaaggactcaatatatggattccggtaaatctgactggcaccctgctgatataattgcatcgctgaagaaacgggggacaaccctggccgccttgtcgcgcagtgcgggactcagctcctcaacgcttgctaacgcgctttcccggccgtggccgaagggtgaatggctcatcgcagactttctcgccgtccatccgtcagagatttggcccagccgttattttaattctatcacaggtgaattattagataggaaaataagagtgaaggtaactaattaatttcaatatatacttataaaaacaataaaaccgctaatcgtaattagcggttttatttacggctcaaaaaaataaatacaactatttaataattcagctgttaataaatttctcaccaagcgcaatatcggccttcagcacatccagcatgccgttcagtgctttctcttcatatgcactgagtgagccgatatccagacgcctctcaacaccgttcttgcctaacacgaccggctgggcgaagaaacgggcgtatttgccgtcaccttcggtataagtgcattccaccacattgctttcaccctgcatggcgcgaaccagtgacaggccgaaacgcgcggctgcctggcccatagagagcgttgcggacccgccgcctgctttggcttccaccacttcagtaccggcgttctggatgcgtttggtcaggctgtcgatttccgcgtcgctgaagctgacacccgggatctgagacagcagcggcagaatggtcacaccggagtggccgccgataaccggcacttccagctcctgtggtttcttgcctttcagttccgccacaaaggtgttggaacggataatgtccagcgtggtcacgccgaacaggcgatttttgtcatacacaccggcttttttcagcacttctgccgcgatcgccactgtggtgttcaccgggttggtgatgatgccgattaatgctttcggacaggttttggcaattttttccaccagattgcggacgatccccgcgttcacattaaacagatcagaacgatccatgccgggtttacgggccacaccggcagaaatcaggacaatatccgcgccttctaatgcaggggtaggatcctctcccgcgaatccggtgatccggacatcggtcgggatatggctgagatcttttgccacacccggtgtgaccggtgcgatatcatataaagtaagatctgaacctgaaggaagctgggttttaagaagaagggcgagagcctgaccaataccacctgctgctccgagaactgcaactttcatcctgagactccttaacttgggacggttagcacgattgcgcatcaggcgccaatccgtgcatgagggctgtgaatacaatattttaacagactgattgcatattcacgcatttgaatctgtttgtctattgttatccattctaaacaaatcgcttatctgttaatgagataaggaacactattttgacaattattttactttaagtgcacttatagtcatgcacgttaatataccgatgcgtaactgataacaacctcatttaattaacaatatatttacctccggtgataacccggtcagagtcataagcaatgtcaattacgtgagctgatcaccagttttgaccattaatgcggtttcccccggtcagaccacagggtttaatttgcataaaaatgcatttttccgcataataataaggttcgtatccaaatttgcaggaaagactatgcgcgcaccttctaaacaggaagatctgatcaaggcgtttaaggcgctgttgaaagaagagaaattcagctctcagggggagatcgtcaccgccctgcaggaagagggctttgagaatattaaccagtccaaaatttccaggatgctgaccaagttcggtgctgtccgcacccgtaacgcgaaaatggaaatggtttactgtctgcctgcggaactgggtgttccgacagccaccagcccgttaaaaaacctggtgctggatattgattacaatgactcggttgtggttatccgtaccagtccgggagcagcacagctgattgcccgtctgctggactccatcggcaaatccgagggcattctcggcagtatcgccggggatgacactattttctcgacaccggccaaagatttcaccacagaacagctctacgaagcgattctcgccctgttcgagcaggaactgtaatccgccgttaatcataaaaaaaccgcgtggtactgatgcaccgcgcggttttttattcttgctcagattacttcagtttttccagcagtttatcgtggataccaccgaagctgccgttgctcatcaccaggatatgatcccccggctgtgcatgttcggccaccatattggtcagcgcatccaggtcaccgctccagtatgccggttgtacacaacgctcggtaatttcactgaccagccacggaatattcgccggctggaagataaagacttcatccgcacgacccagcgcaggcgcgatatcgtctttgctgatccccattttcatggtgtttgaacgcggctccagaaccaccaggatgcgggcggtaccgccgactttactgcgcagcgcctgtaatgtggccagaatcgccgtcgggtgatgcgcaaagtcatcatagacactgataccgttcacctcaccgcgcagctcaaggcggcggcgggcgttgataaatttacccagcgcacggcaggcttccgcgaccggcacaccgacgtgatgtgcggcagccaccgccatcagggcgttctgcatattatgctcgcccaccagtccccaggtcacacgaccgctgatttcaccgtcataacgcacatcgaactcaccgcagtcgttggtgactttctctgcctgccagcgggcgttgtcgccggtgtattcttcctcactccagcagcccatactgagcacctgtttcagattggcatcctgcgccggggcgataattttgccgtcacccggcaccacacgtaccagatgatggaactgtttttcaatcgccgcgaggttttcaaagatatccgcgtgatcaaactcgaggttgttgagcagcagtgtgcgcgggctgtagtgaacaaattttgagcgcttatcaaagaatgcacagtcatattcatccgcttcgataacaaagaacggactgttacccagcgtggcggaaacatcaaagttccccgggacaccgccgatcagaaagcccggctgatagccgcagtcttccagaatccacgccagcatacctgcagtggtggttttgccgtgagtcccggcaaccgccagcacccagcgctccggcagtacatggtcatgcagccactgcggccctgaagtgtaaggaattccctggttcagcaccgcctcgacacacgggtttccgcgtttcatggcattgccgatcaccaccatatccgggcgcggcgtcagttgagccgggtcataaccctgaatcagctcgatcccctgctctgtcagtaaatcactcatcggcgggtagacattctgatccgaaccggtcactttgtgcccctgtgcacgggccaggatagccaggctgcccatgaaggtgccgcagataccgagaatatgaatatgcattattttttatccaatagcatgacgttggtcactattctaaccatctctcaaaagaactgaaacggattagcctatcaattatgattttctttggctaaacttgcacccgcgtttacgggcaaccgctttcgtaatacttttatttcacccacttcaggacgtacgtcatgaaaacattaggcgaatttatcgtcgaaaaacagcaggacttttctcacgccaccggagaactgactgcactcctctccgcgattaagttaggcgctaagattattcaccgtgatatcaacaaagccgggctggttgatatccttggtactaatggtatctcaaacgtgcagggcgaagtccagatgaaactggatctctatgccaacgagaaactgaaagccgcgctgaaagcccgtggtgaagttgccggtattgcctccgaagaagaagacgacattgttgtttttgagggcggccgtgcggaaaacgccaaatatgtggttctgatggatccgctcgacggctcatccaatattgatgtgaatgtgtcagtcggtactattttctctatttatcaccgtatcaccccgctgggccagccggtcaccgaagctgacttcctccagccgggtaaccgccaggttgctgccggttatgtggtttacggctcttccaccatgctggtttataccaccggtaacggtgttcacgccttcacctatgacccgtctctgggtgtgttctgcctgtgccaggcggatatgaaattcccggaaaacggtaaaatgtattccatcaacgaagggaactacatccgtttccctgttggcgtgaaaaaatacatcaaatactgccaggaagaagatccggccactgaccgcccgtacaccacccgttatatcggctctctggtggcggatttccaccgcaacctgctcaagggcggaatttacatctacccgagcaccgcaagccacccgaacggcaaactgcgtctgctgtatgagtgcaacccgatgtcattcctcgcggaacaggccggcggtaaagcgagtgacggtaagaaccgtatcctcgatatcattccggaaaaactccaccagcgttcaccgtactttgtcggtacccgctcaatggtagagaaagccgaaagctttatggcggaattcccggacgaaaacgggaagtaaccaacagtaagcgaaggaaaaggcggtataccaccgcctttttttcgttataatatccgccacgctatttgttctgaagattaaggaatccgttcatgagcctgaataatgttccggcaggtaaagagctgccagaagatatctatgttgttatcgaaatccctgccaacgcagatccgattaaatacgaagttgataaagaatccggtgcactgtttgttgaccgtttcatgtcaaccgctatgttctacccgtgtaactacggttacatcaaccacaccttatctctggatggtgatccggtagacgtgctggttccgactccgtatccgttacagccgggttcagtgatccgctgccgtcctgtcggcgtgctgaaaatgaccgacgaatccggtgaagatgccaaactggttgcggttccgcacaccaaactgagcaaagaatacgatcacattaaagatgtgaacgatctgcctgagctgctgaaagctcagatcactcacttcttcgagcactacaaagatctcgaaaaaggcaaatgggtgaaagttgacggctgggaagatgctgctgccgccaaagctgaaatcattgcttctttcgaacgcgctgcgaaaaaataatccgcagtccgtttcagagacaaaaaaaaccgctgttttcacagcggtttttttattcacagggaaatcattcgctttccgggccttctgcctcgtgccgtttcagccagtccccgcaatttatcttcaccagtccgtccaccggacgctgatataagtaaatccaggcactgccgtacggcgttgaaaccaattcacgccggtaatcctgaccatctttttttaattcatccagctcagtcaggatcgacgaggagatccggtacacttcacattcgatcgaaccggttcccggtaccaccgcaggatagtgtcccaaatcatacaggtcatagccttcaagcgtatattctcccagcagggcggcataggtcatccaatgatggttgccctgtttctgccgcaaactgccataaacgatcactcgcatatattaaaactcaaactgataaagcagatcgatcgcctggttaacaccagacaccgcttccagatataacctgggcattaacctatagcgtaacgttaaggtcgctaaagagtcaaatataccgacaccatattttacctgcaggtcgttggttatcttaccgctgaccacaacctgcgacttatcgcccacaccctgggtatccagcgccagatccgaaataccgaatgtttcaccaatttttccgactaactgcccgctttgtgccaccccgaggctgataagcatggatgtcatctgcgaactgtctgcgtcaccggaatccagcccctcaccgcgcagcaaataagagagggcattttcctgggacatcgcggggtcagaaaatatttccactttcggtctgtcggcaagcccggtcacccggacacccgcaatcacgccgttagcagtattatccgggttacggatagcttccagattaaggaatggctgatccgccggaccggagaacagaatctgtcctttgcgcaccagcagatcctgcccgtaagcatggaaacgcccgcgcggaatatccacctggccgttgagccccagtccctgtttatcctgggcgactttcagatccccggtcagttttgctttcagaccaaaggcatcgagcagcacatcatcaccgatatggatccgcagattactcaggatcggaatactggtctgtttctcacggattggctgtaagttgtcatccagcatcacttcgtcggatgtggcgctgacggcggactccggtacttcatgcacggtgatccgcgcccacggaatattgaccgtaccgtccagtttcagcatcgacggtgtggcttcaaagaccagatccgggctgacatcaatccggatcatcggcggcagggaaacgcgcagtttgtcaccctgtgcgaagatccgcgcactccaggcatccattctgcgccagtccgcgttaccgctgaggttaagatacccttccggcgttttgatgtttccgctgagatcagaacgggcgccatcaaagttcacggtcagtccgccggttgtgatatcaaacggcagcagacgaccgctgacggcgagatctgataatcccagctggccaaacagcagcggtgatgcagcattaccgcccagacgcagccccgcattcagccgcccggtagctttatcccctttgccgagcaatggtttcagcagatccagcgagatattatcgatcccgacattcccgctcagctgacggcgtttctccagatcagaaatctggacattaccgttaatctttccgttaccggcaatagcaatcagccactgaagattcagtttgccgttcttcatggcggtggtcatggtcagggtgtcaaacgcgaccggcagattcgtgccgtcgaggttctgcaccaccttcacaccgttgcctttcagggatgcatccaccaccggctgtgagccgtccgcaaaccagcggacattggcattaccgctgaatacaccatccagccgggtatccgggccaaggaatggtttaatcatcgccagatcaaaacgttcaagggcaaccgatgcattaccggaagctcctgcggtgatcagtttcggcacacagatacgggcatccggattcacccagcaatgggtgccgatagtcacttcctgtttttcattcagataagtcagcgccattaccttgctgagcgaccattcacccaccggtgtgtcaaagcgggtgttattcagcgtacctttccaggtttcggttttacggtcaaatccgccgttcagcatcagttgtgccgagaccggctcgcctttcatggtcagtttcagctggtgctgtgcttcggtacctttggcattcagcgtcaggttgctgatcaccaaatcggcctgcctcagctgattcaccgtcacatccagctgacctttgatctgctctgcggaggtgatatcccctttgattttcgcatccgccaccgacagatcgttctgccatttcaggctgtgaacagccaggtcggcgaggatctgtggtttttccatattaccgcggacattgagtttccctttgaccgttcccgccagccccggaaccaggccgccgagcgccggtgcattgatatccgcatccagcttccaggcatctgccagctcgccccgcacatccagtttattgttacccagtgccagtttcagatccgggattgtccactgaccgcctgcgttacctttcacattaccgcgcgctttcagcggataggttttcactttgccatcgagggtgatatccgggatttcaagctcccagttaccgccgtacaggctgccccgggtactgattttgccgtccactttggccggccactccggataggcttttgcggtattcagcccggaaagcgtcagaaccgcctgccagctgatggctttctgccagtccgccaccccggtcacttccgcaaagccctgtaacgcattcagacgcagccgggtaagattcagctgttcggtattccctttcgcatccagcgtcagcagcgcaggcgggatgtcctttcctttgatatccgaacgcagagagaggtcgtaaccgctcacttttccgttaaggcgcagcttcacgccatcaagctgataatccgcctcaccggtcagcggccagctgactttctgactctccagggtcagcagcagcggcagatcggcctgtgtcaggttggtctgtgcatccagcgtggcattgaccggccctttcagtgccagtgccagtttcagctcatcgagcagcccgccgttcagggtgagatcgagatcctgcccgctgaattcctcaaaatcacggacatggcctttcaccgacaacgccaccggccatttttcactgagcgccacttccccgctgaccgcgatattgccctgtggcgcatccgcagacagatcactgagggtcagcacctgccctttgttaaacagtgccaggtgcagggaattgagggttaccggcgcatcaccgctcacctgccagttctcaccggaaataccttccactgagatattcagcggcagaataacctccggcagttccgccagcatcggctgagcaaaaatctcactgatagtttcacctaacggcttttccggtgcatccgctgccggcgccggttcttctgccgcagccgggtcacttttcggcagcacaacagaaagggcattaattaccgttggtttcagggtcaactggtcgccctgccaggtcatggcggtgcggaaggtatccagatttaccgccatatcatccacggtgacctgtgtgttggtcacagagagagaatccaggaaaatggtcagcggcgcattcagctctgtcagcggctctgacggcggagtttcttctgacggcggcagttttgccgtatcgacagcaacgcgcgtgccgtccgtgctgaggttttcaacacagagtgtcatgtctttcagacagctcaggcgcagcgccaggttgaccttatccacgctgacatcaatacccggcatggtgtatttcacctgcttcagggtcagattacgcagatcaccctcaacctgaccgatagccaggccggagaccacacgcggtgcaagattcagcgcaaaatgcaggccggactgtgtccccaggatccagccgagtgtgccgccagtcagcagaatgagaaccagcagaatgattgccggccatttcagatacttcagccatttcatcagagttctgcccccaagccgatgtaaaactggatatttttcgtttcgttatcacctaccggcgcggcaaggtcaaatttgatcggcccgaccggtgatgcccagcgtaccccgacaccggcaccggttttgaaattactccgtttgatatcattcaccacttcaccgctgtccacaaataccgcgccccaccagtttccggttacgttgtactgatattccagcgaaccgacgaccagccgcgagccccctgtcagtttgccgtcagcatcttccggtgagattttgttgtaacggtaaccccggatactgccgtcgccaccggcgaagaaacgcagatcaggcgggactttgtcgaagttattggtttcaatccagccgaggttgccgcgcatcacaaagcggtgaccatcccacggcgttctcacccagacgttacgggcgcggaaaatggaaaaatccacatccgagccccacatttcattggaaacatccactgagtagcgctgactgtccccccaggatggcatcatcccgccccgcgaacggacacggctgacattcacccccggatagagcagcatggtggtgttggtgatatccgcctgggtaaagtggctgagactccagcgcatattgataccgtactgccagccggtggataaatcccagttacgggaaacactgactgtcgcagtatcggctttggtatcattcagatcggtacgcttatacccgccggagacggcgtaatactgctcaatcgggttgaccttcagcgggatgcggtaagaggtatcaataatctgttccggcgcggacaggctgatactggaggtcaggctgtggccgctggaattcacccacggcttattccatttcgcctgaacacgcggccccacatcggtggcaaagccgccgcccagctcgacaaagttttgtgcgcgcggggtgaatgaggcatccatggtcagataatcactgttatccgcccgggcctttgcaatatccggggtgacgatcgcggactggaaccagccggtttccgccagcagacggttaaattctgccagttgatcagaggtgtagtaatcgccttctttaaacggcaccaaaccttccagatacgcatcgctgatttgcgagccctggtaattcactttcccgaaacggtatcgtttgccgctgttgaacacaaaatcccagtaggccgcatgacgggaaagcgcaatgccgagctggcttttttccatttcggcatcaaaatagccgcgttttaaggcaagcccggataatccgcttttaaaactttcgtactcgccgtgattgacgacagtcccggtttcaggtgtatttttggtaatgaattttttgaatgcgggatcggtttttgccgcaccttcgatatccacggtaaccccggcaattttaaccggctcccccggaacgacacgggcatacagcacaggacgcgcaggcggcgcgttgtcctgataatcaaaggtgatcaccggctcataataccccagcggacgaagcccctctttgatggctttttccacccgggcacgaaaacggccgtcagccacgacctcatcggtcgtgatagtggaaagctggactcttgcatttttttcaagttgcccgctgagcccttccacttttaagcgaagatttgcactatatgccagaggggatgtgagagacacagcgacaacacaaacaagagggtaccggatcacatcaactcctgaatttctgcgatttgactgagatatacctttattcattcagaatacagccaacgaaccggtaatgtgaatgaataagggtataaatgaaaataatttgaagtttactatagatacataagataaataacctgaaatatactgataatgcaccgattattcttaaaacaggagccaccgcaaatgacacaaaacaccactcaatacccgcaggacactattgtatctcctgtttccgccgctgatgcactgccggacagcgccgtggcgctgaccatcagcccgcgccataccgtaaccggccatgatgtgaaccatgtgcctgacggctttgataccgcgtattttgccatgggatgcttctggggtgtggagcgcctgttctggcagcagccgggcgtgtacagcaccaccgccggttacaccggtggtacgacaaaaaacccgacctatgaaggcgtctgcaccggcaacaccggtcatgctgaagccgtccgcattgtgtatgacccgtccgttatcagctatgccgatctgctgcgtctgttctgggaaaaccatgatccggcacagggcatgaaacagggcggcgatatcggctcacagtaccgttctgctatctatacccagtctgacagccagcgcgtgcaggcacttgcttcccgtgagcagtatcagcaggcgatgaatgacaataacgacagccgcagtatcaccacggccatccgcccgctcggcccgttttatgtggcggaggattaccaccagcaatacctggataagaacccggaaggctactgcgggctcggcgggatcggtgtttgtcttccgccttcgctgagaaactagccgcttttcccgttccggtgctatactgcacatccgcgcacagacaaattggatgttctgtgcgcctttcttttttaatatccgatacttatgctctatatatctaaaataaccggtcgccacgcataatcaacaacagcgcgcccagaggcaatcgtgccggccattcggaacttatatgttaaatagtttattaatcgtcctgttactctgcgcgatcagcgcattcttttcgttatctgaaatatcactggccgcctcgcggcgtatcaaactcaaagtcatgattgacgaaggcaataccaatgccgcccatgtgctccgtttgcaggaagcaccggggatgttcttcaccgtggtgcaaatcggcctgaacgccgtggcgatcctcgccggtattgtcggtgaatcggccttttcaccggcgctgcgcaccctgttcggcaattttatggccgatgccgccgcacagcagctcggctcagtattgtcatttattatcgtgacctccatgtttatcctgctggcggatctgaccccgaaacgtctcgggatgatcaaaccggaagcggtcgccatccggattgtccagccgatgcgtttttgcctgacagtactgcgcccgctggcctggctgtttaacggattatccaacctgttctttaaattattcaaaatcccgctggcgcgaaatgaagatatcacttctgatgatatttacgcggtggtggaagcaggtgcggtcgccggtgtgctgcgcaagcaggagcacgaactgatcgaaaacgtgtttgagctggaatcccgtactgtgccgtctgctatgacctcccgtgagagcgtggtctatttcgacaagcaggaaaacgaagagagcatcaaagagaagatctccacacagccgcactcaaaattcctggtgtgcgacggcggtctggatcatgtgctcggttatgtcgattccaaagatctgctcaaccgcgtgctgaacggccagagcctgaatctgcatgaaggtgtgcaaatccgcccggcactgatgatcccggataccctgagcctgtcagacaccctggagagctttaaaaatgccggggaagacttcgcaatcattctgaatgaatacgccatggtgatgggtgttatcactatcaatgacgtgatgattaccctgatgggagatctggtcggtcaggggcaggaagagcagattgtcgcccgtgatgaaaattcctggctgattgaaggcggtacaccgattgaggatgtgcagcgggtgctggatattgatgagttcccggatgacagcaactacgaaaccatcgccgggttcctgatgtataagctgcgccgtattccgaaacggaccgattccgtgaaattctcgggctttaagtttgaagtggtggatatcgacaactacaagattgaccagctgctggttacacggatcccggatgcaccggttgtcccgcgtccgtcagcggcggaaagcggcaaagagggtcagtctgacgtggcacacaacgaacagcaccagaaaccgtaaaactaacccttcttcatcagacaggtattgtggttacgccagctgcgcctgcagcaacgatacctgctgattaatttcactcattgcactcaggtggcgtttgtctctgattttcggcggtaaaatcttgccgtagtcaaattcaaacgcgcccatcccctgtatatacaggcggccacggaataaggttttcacgtagcgggcgatctgagccgggttgtaacgggcgaaaattttcatcgtacttatgtcctcccctttaccttttctttcatgcctaaggtatgactcaattctaccacccgggttcattaatcaaatgatttaatcactatttttacataaaatgacacttcactacgatttacttcacaaatcagagtgaaaatcgatccccgtcacactataacaatgaaataataacctcataattactataagttttataaataatgtgaggctgaaataacgggattaatgtcagcagatacggaatttaacaggcggggaaaagtcagtgtaatttgcataaccatgcaaattacactgttattcaggaataaaatggcagtcagaaactgctgacacggaaccccgggtttatcagtgattcacgcggtgtatagtcgagcgtttttccgctccagtccgtaatatgcgctccggccgcgagtgcaacggcatgtccggccgccgtgtcccagatgtgggtcgggttaaaacggggatagagctgcgccttaccttccgccaccagacagaatttgagggatgaaccgatagcacgggtttcatgcggccccagttgctccagataatccgccagttccgcatcctgatgtgaacggctgatcaccaccatcggcagatctgtattcaccactttgacagccatccgctgcccgccccgctcacgccaggcgtgtttgccttctgccagatagagcacgtccggtaccggggcatacaccacgcccatcaccggtacgccgtctgaaatcagggcaatattgaccgtaaattcaccgttgcggctgataaattctttggtgccgtcgagcggatccaccagccagtattgtgtccagtgctgccgctcagaccacggctgcggatcttcctctgacagcaccgggatgtccggtgtcagagacttcagttcctgcacgataatgtgatgcgcagctaaatccgcagcggttaagggggagttatccgctttggcggagatggtcagtgtgtcgggatgatggtagatatccatgattgcatcgcccgcccgccgggccagcagacaaatttgattgagcatccttcacctctttcacagaacggttagtgagtcgcgtaatcctgttcacgtctccggagacctgagtatagaaataaaaatggccggtgaaaaccggccatttcgcatattctgttattgttgacaaagagagattacaggatctccagcagctccacttcgaataccagtgtgctgtacggcgggattgccgcaccggcaccgcgctcgccgtaagccaggttgctcgggatatacagttcccatttggagccgaccggcatcagggtcagtgcttcaatccagcctgcgatcacgccgtttaccgggaattctgccggctggccgcgctgtacagagctgtcaaacacagtaccgtcgatcagacggccggtgtagtgaacacggacacggtcagtgcgggccgggatagcgccgtcaccctgattaatgacagagaactgcaggccgctttcagtggtggaaacgccttctttcttcgcgttttcttccaggaaacgcatgccgtctttaaccagctcagcctgtttttcattgcggacagcatcagcacgctcatgcatttcacgcagggcacgatgcagaacatccaccgccacagccggctggttattttccagtgcgtcggtgataccggccaggatggcttccggtactaatccgctcagtccggattcctgtaattgctggccgatttgtaagccgattccgtagcttgcctgtgcttccatcgtgtcaaaagtcggttgtgtcatgagagatacctgagtaataagtaagacggacaagcataacagcaggatgtaccccggtaaacccgataatcagtgaaagctgatgcaacacggtgattcccggaaaacagcacaatcaatttataaaacaggactaattccgaataatttcagtaagtctgctgctacactggaataataccggatgataattattcatgctgaacagcgggagattatgatgagactactgccaaagcgccatctttacgctatcgccgccattgcgctgattatcatgctgatcctgtttttctggcctgccgcgcagaaaccgccggtgaccgttccgcctcagaatatcacactgacgccaccggcagatccgttaggtgacctgatagctgaacagaccggcacactaccggaggcaccatccgatatcccggatttgccgctgccggataatctgccgcctggtgtactgaataccgaaccggctccgcaaccggcgaccacaccaccgccggttagtgcagagtctgctcctgctgcggtgcctgcacaggcagatgcactgcgtttcaccctcaaaaagggccagaccatcgcccaggtctttcgcagcaacgggttaccggtggatgacttatttcgcatgacagccgttgaggggccgcagaagccgcttaatcaggtggaggcaggggataaaatcagtgtgaccaaaggaaagggaaatacggtctctgtgctgaggattgataaggctaacgggcagtccgccacctttaagcgacagaaagacggcagttaccgccgctcttaacaccggtttttactgcaaaaaaaaacgctggcctgagccagcgtctttcaaagatgtttaccgtgtaatcagagattactcagcaacaatcttcacattcagttctgcaaacacgtcgctgtgaacctggaagtgaacttcgtgatcacccagagtacgcagaacgccgtttggcagacgaacttcgcttttcgccacttcaacgcctgctgcagttacagcatcagcgatgtcacgggtaccgacagaaccgaacagtttaccttcgtcacccgctttggaagacagagtcacaacgcccagggcattgattttttctgcacgagcgtgtgctgctgccagaacgtcagctaatttagcttccagttctgcgcggcgtgcttcgaagaattcgatgtttttcttggttgcaggaactgctttaccttgcggtactaagtagttacgtgcataaccagatttaacatttacctggtcgcccaggctgcccaggtttgctactttatcaagcagaataacttgcattaccttatcctcttaaagtcattaatggactgtgccgattactgatgacgatcagtgtaaggcagtaaagacaggtagcgtgcacgcttgatagcacgagcgagctgacgctgatatttcgcactggtaccggtgatacggcttggtacgattttaccactttcagtgatgtagtttttcagcgtagcgatgtctttataatcaatctcttgaacgccttctgcggtgaaacggcagaatttacgacgacggaaataacgtgccatatggctagtctccagaatctatcaattcaatatgttcggcatgaagaaccagttttgataatccatttcgcccctgatgggtgctgatgaatccctgaacggttatctgactgccgaccgttatactgcgagtaatggtttggatcgtctgtccgctggcaaccacgggcattctgcaccatgcctgccgggtgagtccggcttcctgctgttgtgagcggtgctcaagcacaaactgacaatgcggaattccggccgggctgactttccggatgggttccctgcacactgtgccggataacaccagacggttagcggacaccgttattactcttcagtttcctcagcttcatcattttcttcaatgtcgtcagacatgtcgcgcgggcgacgttcgtctttcgctttaaccattggagaaggttcagtcaccgcgtgcttaacgcgcataaccatgctgcggataacggcatcattgaagcggaaaatagtttccagctcgtcaatcacttcctgcggagcttcaacgttcagcagaacgtagtgcgctttgtgcagtttgttgattgggtaagccagttggcgacgaccccagtcttcgagacggtggatctgaccttctgcgttagtaatagcagttttataacgctcgatcattgccggtacttgttcgctctggtccggatgaaccatgaagacgatttcgtaatgacgcattagtagtgctccttacggattattagcctcctgtccgggcaaccgcaaccctgagaggcaaggaacttgtttaagtgcggctgaaaaatttgacgcataactatactcatacccgtcccaaaagacaaggtaataagtgtgtgatgcgggattattttgcgcgctgacgcacggcctcaaacaggcagacacctgttgccaccgagacgttcagggaagagactgacccggccatcggaatgctgatcagttcatcgcacaggtcgcgggtcagacggcgcatgccttccccttccgcgcccatcaccagcgccaccgggccggtcattttgctctgatacagatcatgggtggcttcaccggcagtgccgacaacccagatattttcgtctttcagctgacgcagtgtgcgggccaggttagtgacacggataagcggtacgctttccgccgcaccacaggcgacttttttcgccgtggcattcagctgcgcggagcggtctttcgggatgatcaccgcgtgtacaccggcggcatcggcggtacgcagacaggcccccaggttatgcgggtcagtcacgccgtcgagtaccagcaggaacggagtctcatgctcagccagcagatcaggcagatcctgctcctgatactgacggccgcctctgactttggcgataatcccctgatggacggcaccttcggtctggctgtccatccactgacggctggccatctgcacacggacacctgccgcttccagagcatgcacaaccggggtcaggcggcggtcttcacgcccttttaagataaagacttcaagaaaacggctgggatcacgcgccagcaaagcatccacagcgtggataccataaataatttcactcataacgttccgtttgttgcgggacaataaaacacaatgaggcgcaatgcctcattgtgggaaaattcaaatcaaaggcggttacttctcagcttttttcttcgcgcgtttcgcctttatatttgcctcgatttttttggtccgggctgattttttacctttcggggctttcgggccgtcgtcttttttcttcttacggaatgcactgtccggctcgaagtttttgtcacggcggggatcccctttcttaccgtcccggcgcttatctcctttctccccggctttcgcccgggttcttgcggttttgccttcattacgggcacggcgggtggtggaaatcagcgcgaaatcaatggtgcgctcatccatatgcaccgcttccacccggatttcaacttcatcacccaggcggtacacattggaggaggattcaccaatcagacgctggccgacattatcgtagcggtagtaatcgttatcaagtgttgatacgtgtaccagaccatcgataaacaggtcattcagacggacaaagaaaccaaacccggtcacactggtgataagcccggtaaagacattacccacctggtcctgcataaagtcgcacttcagccagtctgccacgtcacgggtggcttcatcggcacggcgctccgtcatggaagtgtgctcaccgagctggagcatactctgcatatcgtaatgccacgcgccggtctgcgatttcccttcgccgcgttcttttgccagcaggtacttaatcgcacggtgcagactcagatccggataacggcggattggtgaggtaaagtgggcatacgccggtaacgccagaccgaagtgaccgcggttgtccggatcataaatcgcctgtttcatcgaacgcagcagcatagtctgtaacaactcgtggtcaggacgctccgccacttccagcatgacacgggcgtaatctttcggctccggtgtcaggccgcccggcagggtcagacccagctcattaaagacggtgcgcagattgatgacgctgtcctctttcggacgatcatgcacacggtacagcgccggttcgttgtttttctcaacaaagcgtgccgccgcaacgttcgccatgatcatgcactcttcgatcagtttgtgtgcatcgttgcgcagtaccggttcaatgctctcaatgcgtttttccgcattgaaaataaatttcgcttcttcggattcaaaggcaatcgcaccgcgctcgtcacgggcttccgccagtgctttatagagtttgtgcagctcttccaggtgttttaccagcggtgcatagtgttcgcgcagctcttcatccccttcgaggattttccacaccttggtataggtcagacgggcgtgggagctcattaccgcttcatagaaacggtaaccggaaagcttacctttcgccgaaatggtcatttcacacaccatacacaggcgatcaacctgcgggttcagtgaacagacaccattcgacagcacttccggcagcatcggtacgacctgtgacgggaagtaaaccgaggttccccggctgcgggcttcatcatccagtgccgtctgcggacgcacataataactgacgtcagcaatcgccacccacagacgccagccaccgccgcgtttggcttcacagtgtaccgcgtcatcaaagtcacgggcatcttcgccgtcgatagtgaccagcggcagatcgcgcaaatcaacacggccttttttggcggattccggtacttcctcgcggatatccgcgacctgacgttccacctgagcaggccaggtgaacggaatttcatgtttgcgcagggcaatatccaccgcaatactggtgcccattttctcgcccagcacttcggtgataacaccgagcgcctgcacccgtttgcccggacggcgggtcagttccgccaccacgatattccccatccgtgcgccgttaattgactctttcgggatcagaatatcgaagcacagacggctgtcatccggcacgacaaatcccatgccttcttcggtaaagtaacggccgacaatctggccggttttcggctcggtcacacgcacaacgcgcgcttcgcggcggcctttgcgatcagcccccatgacctgggccaggatcacatccccgtggatgcataatttcatctgatcctgcgggatatagagatcgtctttttgtccttcgacacgcaggaacccgaagccatcacgatggccgatcacggttcctttaattaaatcaagacgctccggcagggcgtagcactgacggcgggtaaagaccagctgcccgtcacgctccatggcgcgcagacggcggcgcagggcttcctgagcctcttcaccggtgatccccagttcctgtgcgatatcttcgcggctcaccggtttggtgtgacggcggacagtttcaagaataaattcacggctcgcgatcggggaatcatatttttccgcttcgcgctcacgataagggtcgtttgattgtttttccactgacattgtatcctccgtggtttctgaacggcgttattcgtccgtcagtaacaatttataaagatgctgattgtcctgcaccatatcagcgagcgtgtgtttatccagttcctgtaagaactcccggatggctttattcagtaccgatttcagtctgcatgccggagtaatgtgacagaattcaccgctgcagttcaccagtgttaacggctcgagcgcgcggacaacctcaccgatacctatagtattagcaggttttcccaggcggatcccgccatttttgccgcgaatcgcctcgacataacccaaatggctcaattggttaattatcttgaccatatggttacgcgatacgccgtaaacatccgtcacttccgtaatactggtcattttaccatcaggaagtgacgccatataaatcagcgcccgcaagccataatctgtaaaactggttaactgcacattttaccccggaaattctgtcatcccgcgcgggggatcacatgataagtaatggataatcattatgtgtgtcttttgcttattaagcaaaatttgtcgttaaaaacgccggatttcctgtcatgacatagtcagaaaccccggcgtcagaaaacaaaaggccggacaaacatgcccggccctgactggtatcacctgaacgatcttatgcgtcgaacgggtcgcgcaggatcatcgtttcagaacgatccggaccggttgaaataatatcaacaggaacgcctgtcagttcttcaatgcggcggatgtaatccagtgctgcctgaggcagttcttcgcggctcttcgccccgaatgtggtttcagtccagcccggcatgacttcatagataggctcgatgccttcccagttatccgcagccagtggtgtggtttcgatgatttcaccattcggtaaacggtaaccgacacacactttcacttctttcagaccatccagcacatccagcttggtcatgcagaaccctgacagggagttgatctgcacagcgcggcggatagcaatgatgtccagccagccgcaacggcggctgcgtccggtggtcgcaccgaactcctggcctttggtacgcaggtattcaccggtttcatcaaacagttcggtcgggaacggaccggcacccacgcgggttgagtaagctttgatgatacccaggacataatccacataacgcggacctaaaccggaaccggtggcaacaccgccggcagtggtgtttgaggaagtcacatacggataggtaccgtggtcgatatccagcagtgtaccctgcgcgccttcaaacatcaccagctcaccgttaacggtggctttgtacagcagatcagagacatccacaaccataccggtcaggatatccgcaactgccatgatttcgtccagggttttctgatagtcaaccgcaggctctttgtagtagttcactaactggaagttgtgatactcaaggatttctttcagtttctgagcgaaggtctctttatcgaagagatcacccacgcgcagaccgcgacgggcaactttatcttcgtatgcaggcccgataccgcgccctgttgtgccgatagctttcgcgccgcgtgctttctcacgggcattatccagcgcaacatgataagggaggatcagcggacatgcttcagaaatcagcagacgttcgcgcaccggaacaccacgctcttccagtgcagtcatttctttcagcagtgcatcgggtgcgagtacaacaccgttagcaatgatgctgacgacgttttcgcggagaatacctgacggaattaaatgcaggacggttttctcaccgttgataaccagagtgtgacccgcgttgtggccaccttgataacgaacaacatacttagcccgttcagtcagcaagtcgacgattttgcccttgccctcgtcaccccattgggtgcccaatacgacaacgttcttacccatttcgtttttacctggttgcttaaaaaaggattctagcatctcatgaccgccctttcagcactttttatccactttatgaaagtcacctgatcaatgtccataataaagcccgcctaagcgggctttcttcatcagagtgcgaccatcagcatgctgacgatttttcagtaccggttatgcggttaccggacttactggcctgaagccggacgcaatgatgtcggtgccttcatgtaacggaagaaatccgtatccgggcttaacaccataatgtcgttgccatcgggtttgaagctttgctcataagcacgcaggcttcggataaacgcatagaaatccggatcctgactgaatgcatccgcaaacagtttagcggcttccgcatcacccgcaccacgcagggagagtgactggcgctccgcttcggccaggatttcagtacgggttttatctgccaccgcacgaatcttcatggcttcttccagaccctgtgagcggtgacgacgcgccacggcttcacgttctgcacgcatacgctggaagatagcttcggagacttccgcaggcaggttaatctgcttgatacggacgtccaccacttcgatacctaacgccgccatactgttcggattcacctgcggctgtgcgcctttggtttcttcctgaacacgcgctgccgcatcggcaatagcgttatcagcatcggttgcctgcggatcgttaccggagctcccttcgttcagtgcatttttgacttccgtcgttaatgtaccgcgggaatccgtcacaatctctttcacgctcagacgaccgaactcagaacgcagacggtcactgaatttacgtttcagcaggttttcagcctgattaatattaccgctgtttgtcgcgagataatacaggctgaaatcactaatccgccatttaaggtaagaatcgacgatcaggtctttgttttcgtttgtcaggaaacggtcagcctggatatccagtgtctggatacgggcaggcaacattttcactgtttcaataaacggcactttcagatgcagacccggctcatacacaatcggtttgttatccgcatcacgcagaactttgccaaaccgcagcacaataccgcgctcggtctgctgaacggtaaagacagacgcatacagaacgcctaaaaccagaataacaataacggctaaatacttacgcatgattattgtctccctgtgcgttcagtgttgccacggatacccgaactgctgagatcatacgtgttgttgtattcagcgggtacattcggattctggctgctgttttgtgcctgacggcctgccggtgcctgtgttgccggtgcggatgatggtgtggcagcggctttcgccggtgcagcctgagaggcggctctctgctcacgcataatctgatccagcggcagcaccatcatgctgttgcttttatcattggcaatcactttacgggtattgctcagcacacgttccattgtctcaatgtacagacgttcacgggtgatatccggtgccgcacggtattccggcagcattttcgagaagcttgccacttcaccgcgcgctttcagcacgatactggctttatacgcctgtgcgctttcgatcatactttgcgcattaccttttgccagcggcagaacttcgttcgagtaagcttccgcttcacggatggattgctgttcgttttcacgcgcggcaatcacgtcatcgaatgaagcctgaacttcagccggcggacgcgcttcctggaagttgacgtcgacaatcgctatccccattttataaggcttgattgtctcttcgaggactttctgggtttcgttacggaccacggtacggttcgccgtcaggattttctccatggtgaacttaccgataaccccgcgcaccgcgctgtccatcgcctgacgcagactgttgttcgggttagtgacgctgaagaggtaatcttccgggttcactacctggaactgcacgttcatgttaacgcggaccacgttctcgtcagcggtcagcatcataccgttggtggcaagatcctggacggtcgccacatcgaccgcagtaacgcgatcaataaaggtcggtctccagttcagacccggctgaaccacatgactgaatttaccgaaacgcgtaaccacgccgcgctccgtttctttaatcgtatagaagccggttgcggcccagacaacaacaacggcggcaatagcgagactgataatacgtccgcccgcgaactgtaccggaggacgattgttcccgccggactgcccgttattgtttccgcctttaccgccacccagaccaccgagttttctgctcattttccggaacagatcgtcgagatcagatgccccacggttccggccgcctttgttaccgtcggagttgccgcctttattgctgctcccccacgggtcgcggtcctgtccgttattaccgggctgattccacgccatgccttcgctccactcttttatgatcggtttttcagggctaagagcacaaaaacgcgctctcaattaatatattacgccgctgataatcagataacgtaatcggctaactgttgttcctgcttgcagaggcggcgccagtcaacaatgggcagcctgatttcaaggcaaatccggccgtcatcatcaagccactcgcgttcaatcgcctgaagctgataaaaacggctgcgcagacgaccctccgacggaggcagacacaattccaggtgtgcgatctcaccggaaaggcgttccgtcagtgcccggaacaacaacgggatccctgctccggtctgtgctgaaagccagaccctgaccggcaggttatcctcatttctgtcgatacgcggttcgaaatcgtccagcatatcgattttattcatcactatcagaaccggaatttcatgtgcatcaatctcttccagaactgcattaaccgcatgaatattttcatccacacggttatccgccgcatcgaccacatgaagcagcagtgtcgcttcgcgggtttcctgcagcgtggctttaaatgccgccaccagatcatgcggcagatgacggataaacccgaccgtatccgccagcaccaccgtgccgacatcatcgacatcaatccgccgcagggtcggatcgagtgtcgcaaataactgatccgcagcatagactttcgcatcagttatgtgattaaacagactggatttcccggcgttggtgtaaccgaccagagacaccgtcggaatatccgctttactgcgcgcctgacggccttgtccgcgctggcgttccactttttcgagacgccctgaaatctgtttgattttatcccgcagcatccggcggtcggactcaagctgagtctcacccggcccccgcagaccaatcccgcctttctgacgttcaaggtgcgtccagccgcggaccagacgcgtggaaagatggcgtaactgcgccagttccacctgtaatttaccttcatgtgtccgtgcccgctgggcgaagatatcgaggataaccccggttctgtcaaccaccctgcactggcataaacgctcgaggttgcgttcctgcgccggacttaaggcatggttaaagagcaccacatcggcttcactttcggtgacagcatcggcaatctcttccgctttaccttcacccgcaaaatatttcgggtgcggggcgctgcggctgccggtgactatctgaacaggtgtcactcccgcggatgtcacaagggattcaaattcactgagatcatcagtgttcttatcctgtgagaaaaatatgtggaccagtacggcccgttcaccgccttcatacctgtcaaacaacggcagaacctctcaggctgagtgaaaaacacgcaggaaaaaacacaggtaaagtctccctacctatgtttttccgcgattgataactgcacactgacttattcagcgccatcagtatcctgttgcgcaccaccgttaccggctgactggtggtaattgctgccgccggtccccgggtttgcgccaccgctgtggtgagaaaccggacgggaaggtacgacggtagagatcgcgtgtttgtaaaccatttggctgaccgtgtttttcagcagaataacaaactggtcgaatgattcgatctgaccctgtaatttaataccgttgaccagataaatagaaaccggaaccctttcgcgacgtaatgcgttcaggaacggatcttgcaaagattgccccttagccattctgtattttccttattttgttgttttttaaatgaaacccaagctgggttcgaaaaataactactcaaaaactttcgtaacccgttaattgtacacaatcaacggcgctatgcacgaagaacctgcataacggctttaagagattgttcaggctgttcactgtcgagccactgaacaccttcccaaccccgcaaccacgtcatctgccgcttggcaagctgacgggtggcgcaaatgccccgatacaccatgtcatcataactgatttctccggccagatatgaccacatctggcggtagccgacacaacggatcgacggcaaatccggatgaagatccccgcgctgatacagcgcacggacttcgtcctcaaaaccggctttcagcatcatctgaaaacgcatttcaattcgctgatgcaatattttacgatctgccggtgcaatggcaaactgataagcattaaagggcaaattctcccctgcagtttccgtcagttctgtcattgttttgccggagatatagtatacctccagtgcccggctgagccgctgcggatcattcgggtggatccgcgccccggcgaccgggtcaatccggctcagttcatcatgaagaacctgccagccttcctgtgccgcccgcgtctcaatctgtgcccggatttccgggtcagcggacggcagcggcgataatccttccagcaatgctttgaaatacatcatggttccgccgaccagcagcggaatttttccctgcgcggttatctcatgcattgccgccagcgcatcacggcggaaatcggcggcggaataggccactgacgggtcgagaatatcaatcagccggtgcggggcaagtgccagttcggcagcatcgggttttgcggtcccgatatccatccccttataaatcagtgcggaatccacactgatgatttccaccggcaggtgctgacgaagttcaatcgccagcgcggtttttcctgaagccgtcggccccatcagaaacagggctgcgggtttatgatgattctgttcactcatgacgtaatgctgcaacgacctcagttaaatcaattaattgcaataaatctgccggcggtctgcgcaccagttgcgggcacagccgctccacatcggccagcagctgcactgcctgggctttgctctgagccgccggttcactgaccagcatctctgccagccgcgacgcaatggctttctcatccgcctccgggttatcagccaggaaacgcagtaattcagggataagatgcggtaaattttgctgacgaagcggtaacgataccgtacgaatcgtcgcttttccacgggaaactgagccttctataccgaaagtacgcaataccccggcaaactgcgtaaatgtctcacactcctgtgcgtttaatgccatctgaagcgggatcatcagcggctgggatttcagtccctgctctcccgggatcagttgctgacaacgcagataatgtgatgctttgctgagggaaaacagcgcaatacctgcatctgtctcaattaacgcataacacggcggataaagcgtaaggattttaccaaaacttacacgctcacttttttccgtcactggctcacttgcggcgctgatccggttttctgacagaaaagtgcttttttccggaaacagctgcggccgggtttctgccggtgtctgcatcagtgactgatatattccggcttctttcgggctgtaaacgggtttatccgcagaatatgccggttttccgctgctgtggccgctgtgagacgcgccgcccccggtggtttcccggcgtggcggcggtgtgagtacgtcctcacgctcaaagatatttttaccggctgccgcgcggttttccggcacatgctgtgtctgcggcgctgacggatccggctcatacaaagagacaggctgctcatgctgtttcagcacactgagcaccgcctgataaataaagtcatgcaccagccgcgcctgatgaaaacgcacttcgtgcttggccggatgaacattcacatccacctgacgcggatcaatggtcaggtaaaggacataggcaggctgctgatcgccgctcagccggtcttcataggcctggcggatggcgtggttgatcaggcggtcgcgcatcatccgtccgttaacatagcaatactgtaaatccgccgggccgttgtattctgccggtgaagccacccagccgcggatctccagctcttcgtgagaccaggttaccgccagtgcctgctgcataaacgcggtaccacagatagccccgagacgtcgctcctgctgatcttccgctttaaccgggcggtactggcgcatcagtttaccgttgtgggtgagattaatggccacatcaaaacgggacagcgcgatacgccgcaccacttcatcaatgtggccgaattcggttttttcagtacgcaggaatttgcgccgcgccggagtattgaaaaagagatccagcacttccaccgtactgcccgccggatgtgccgccggtttcagcgtcaccgccatttcgcgcccttcggcatatgcctgccaggcttcgttctggtcacgggtgcgggaggtaaaggtcaggcgtgatacggagctgatactggcgagcgcctcaccccggaaccccatgctcatgatggcttcgagatcatcgagtgtggcgattttactggtggcgtgacgggccagcgccagcgccagctcgtctttggcaataccgcagccgttgtcacggatgcggataagcttttcgccgccgcgctcaatatcaatatcgatacgggtggcaccggcgtccaggctgttttccaccagttctttcaccaccgatgccgggcgctcaaccacttcgcctgcggctatctggtttgccagctgcggcggtaaaatccggatcgccataattgcccccgttctcctgttatttggacggcgctgcctgtaacgggttcgcggtaaagtatgcgcgtaacccgccgtggatcgcggcagcgacctgctcctggtaagtgtcagatcctaacagctgttcttcagtgctgttactgataaaaccggtttccaccagaatggacggaatatccggtgaacgcagcaccccgaggctcgcatgctccggcgtgcctttgtggactttacctatctggcgcagctgacggatcacgtcctgcgccacggcataaccgacacgctgggagttaccgaactgcaaatccagtaccgcctggctgagatacggatccgcgccgtttgccagtgcatcaccggcaccgccgagcagttcggattgtttctcgctctgttccagccagttacctaattcgttatttgcccgccggttggagagcacccagactgacgaaccggtcgcggtgcggtttggtgcggaatctgcgtggatggacaccagcatgttggagccgaatttacgcgccacttcggagcgtccggccaccgagataaaataatcgccgtcacgggtcagtaccggtttgaacatcgggtcatctttcaaacgcttttccagcttgcgggcgatactgatagtgacgtttttctctttcaggccgttctggccgatagcgcccggatctttcccgccgtgtccggcatcaattgccaccacgacctgacggctgtttttcggcagtttacctgtcggtaccaccggaatttttgcctgttccggtgcagcggccggagtggttgctgccggagccgctgccgccggagcagcactgccgctgttcatgcgcagcggtttgccgcttgtggtggtgaccggttgtgcggcagccaccggggctgcgctataactgtttttgccggtcagcgtgatggtcaggccgctgttatccgcagcatcgcggaaactgtttttatccgccagttccagcacgatacgctgatgctgagcatccggcgcacggctctctctgaccactttaatcagcccgttattcagattgatcggcagaccggtaattttctgcggctgacggatgtcgatcaccagacgctccgggtcatgcaacggaaacagtttatattgcggtttgccgtcaaaactgagctgtaatgtgccctgagaaccgttgttgttcacattgatgcccgtcagggacgcggcgtgcccggctgcactgaacagcaggctcacgcagaaaaacagcgccgtcagccatgaaacggcagccacatcagatttccgtgtcagatatgcattcattatcggtaattcctcacatctccgctaacttatccaggagttcttcaccataaggggaacgggcggtaaaacgggcttcccgtccttcaccatcataccgtaagtgcaattccaaatctgcatccggcagaaaaccggcccctttttgcggccattcaaccagacagacggtgttttccccgaagtaatcgcggatccccataaattccagttcttccggatccgccaggcggtacaggtcaaaatgatagaccggacgtggtgagagctcatagggctcgaccagggtgtaagtcgggcttttcacatggccgggatgccccagcgcctgaagaaagccgcggctgaaggtggtttttccggcccccagatcgccgaaaagatgcaggacaaatccgcgctgactctgctgtgccaatgcacggccgagcgcgacagtggcagcttcatctgccagcgtaaacagacgttctttcattctcgttgtcgtcacaggttattttattgaaataattgagcgtgtaatccgttaaacataccacattccggtgatatacctgcataacggcgtgcgaaaaaacgacaataatgcgcagtttttgtgccggacggtctgtgataaactccgcaccattcaccatcacacctgcaatgtaagtaaacactcactaatgagcactcaccctggtttacaccagcttgccgcccggataaaacaatggggacgcgaactcggctttcagcaggtcggtatctgcgatacagatctcagcgcggaagagccgaagttacaggcgtggctggatgcaggctatcagggagagatggactggatggcacgccacggcatgatgcgcgcacgccctcatgaactgctgccgggcacgctgcgggtgatcagtgtgcggatgaactaccttccggccaaagcgtcctttgctgctgtcctgcaaaacccggagcagggttatatcagccgttatgcgctggggcgtgattatcacaagcttctgcgccagcgcctgaagcagctgggagagcggattcaggctgagtgtgatgaactggctctggaaaacaccctcagctaccgcccgtttgttgactcagcaccggtactggaacgcccgctggcagccaaagcgggtcttggttgggttggtaagcattcacttattttaaaccgtgaagcaggctcctggtttttcctcggcgagctgctgatcaacctgccgctgccggttgatacgcctgcggaagaacagtgcggccgctgtgtcgcctgcatgaccacctgcccgactcaggcgattgtcgcgccttatactgtcgatgcacgccgctgtatctcctacctcactattgagctggagggcgctatccccgaagaattccgccctctgatgggaaaccgcatttacggctgtgatgactgccagcttatctgcccgtggaaccgtttttcacaactgacagacgaggcggatttctcgccgcgcaagcgcctgcacacgccggaactgctggatttattcgcctgggatgaagccaccttcctgcgggtgacagagggctcggctatccggcgcatcggatatctgcgctggctgagaaatatcagtgtcgctctcggcaatgcaccgtatgaagataaaattattattgcactgacagaaaaaaccggactggcagactggcttgatgagcatatccgctgggcagttgcccgtcagtatgccaaaagagatgaatcacgtatcgaaatacagacttcacagcaaaaacgtcttatccgcgccatttccaaaggtttgccgcgcgacgcctgatcccgcctcataatcccgttaagttatccacaatattcagtgttgtgaataatataaaaagaccttgcctatcaatgtgaagaaaaaatacaagagagccgtcacacaattcacataaattaaactaacatataaatatcaatatattaaatatactgtcgttcagtattttgcggaattctgtgattcagccgacaaaaccggcctgtggataactctgtgcagaaaagtgtgtcagaacccccgggatgtgaataacataccccgcagcgctgtggataaaaaatgacatccggacaaaaaaattgcccctgtttgacttaatcaccccatgaaaggtgatgaaaagcagaaactgacataaagatagtgcagaaagtgccggtggtaatctttcactgtctgaataatcaccgctggtgatcgttcatctgcccttcgtcagagagggcgcaaattctatttcaccacgccgggattagcaagacttttccccgtatttacgaaaaaaaagcatctaacagattaaattatcagcaaaagttcagtgtggacggttttgtgctgcggataactgtgactgatgattatttgcaccgcacagcagttttcccggcagaaccggtaacagaaatcacgcaaaggattttattcagaaaataatgttcggggggactgaagagaagaaaaagattggagcgggaaacgagactcgaactcgcgaccccgaccttggcaaggtcgtgctctaccaactgagctattcccgcatcacaacggtatatacctgactatctgaaaattggagcgggaaacgagactcgaactcgcgaccccgaccttggcaaggtcgtgctctaccaactgagctattcccgcgtcacaaccggtatattacctgacaatctgcaaaattggagcgggaaacgagactcgaactcgcgaccccgaccttggcaaggtcgtgctctaccaactgagctattcccgcatattttgcaatttgcccgcaccgctttcgattgaaaatctatctcggtacggggagcgcattatacgaaaaattcattttctggcaagccctccggcacgaaaaaatgaatttttttgttcagatgccgataaaaccggcaaatatgctataaaacacgcaacctgaactaatattaaccgaccggcggctgaaaatcagccaccgttttttatcacaggcggataaaggtttcgcggtagtaagccagttccgcgattgactcgcggatatcatccagcgcctggtgggtgtttttcttggtgaagccgtccagcacttccggtttccagcggcgggccagctctttcagggtgctgacatccaggtaacggtagtgaaaatattgctcaagcgccggcatataacggaacagaaaacggcgatcctggccgacactgttaccgcagataggagaagcgccctgcggcacccactgctccaggaacgcgatagtggcctgctctgcctgtgcgtcggaatacgtgctggcgcggacacgttcagttaacccgctggcgccgtgtgtgcggacattccagtcatccatcagacctaattgttcatcagactggtgtaccgccagaaccgggccttccgccagaatattcaggtttgcatctgtcacaatggtggcgatttcgataatccggtcacgttccgggtcaagtccggtcatttccagatcgatccagataaggttctgttcactttttgccatgttgtatcctatagttacctgagtatccgcctgttttttgttcacacggattgaatgatgacgggtaaaatgaatggtgtatcatagcgcgtaatccgccctgccgcgagtcaccccggcgggcactttcttctttacgtggtgtcaaaacagacgaggtttcgttggctaaacaaaaactttccaaaggtcaggtacggcgtgttcaggcaaaccagcagcgcaaactgcgcaaagagaaccgcccggagcctgaggacagcctgttcggtgaggctcaggaaggacaggtaatcagccgtttcgggcagcatgcggatattgaagccgcagacggctcggtacagcgctgcaacctgcgccgcaccatcaaatcactggtcaccggtgaccgcgtggtctggcgtgcggcgttgcagaataacgaagaaggccgtgttaacgggattgttgaggcagtgcatgaacgtgaatcggtactgacccgtcctgatttttatgacggtatcaaaccgatcgccgccaatatcaaccagatcgtgattgtttccgcgattttaccggaattatcactcaatattattgaccgctatctggtcgcctgcgaaacactcggtgtggaaccactgattgtgctcaacaaaattgacctgctgaatgacgaaagccgcgaccaggtcaatgatttaatgaatatctatcgtaatatcggataccgtgtgctggaagtatccggctacaccaacgaggggattgatgcactgacggcagcacttgccggacggatttccatcttcgccggacaatccggtgtcggaaaatccagcctgctcaatacattgctgccggaaaacgcggatatcctggtcaataacgtttctgatgtttccgggctgggtcagcacaccaccaccgcctcacggctgtatcatttcccgcacggcggggatgtgatcgactcaccgggagtgcgtgaattcgggttgtggcacctgacaccggaacaggtcactcagggatatacggaattccgcgattatctcggcggctgtaaattccgtgactgcaaacacggggatgacccgggctgtgcgctgcgcgaagctgtggagaacggcgaaatcagtgcggaacgctttgaaaattatcaccgtattctggaaagtatggcacaggtgaaaccacgccgtaattttacggccggtgaagactgacaagcgcaataagcacaggtacaatagcccccttttgttcagaattcgccggaaaaaccggcagataacaaacaataccagaggtcgatgtgctggatactcttaaaataaaattacaatatttgctgcctaaacagtgtcttactcagctggcgggccgctttgccaacaaaaaacttggctggctgacgcagttggtgatcaaagcattcgccaaagcctacaaagtggatatgcaggaagcgaaagagagcgaatttatcgcttacagtaccttcaatgagttttttatccgcgcactgaaagaggaagtccgccctatcgtacagggcagcgaaaccctggcactgccggcagacggcaccatcagtcagctggggcttatccgtgacgatcagattttacaggccaaagggcataactacaccctggaagccctgctcgccggaaactggcagctggcggatctgttccgcaacgggcagtttgtaaccacttacttatctccgcgtgattaccaccgcgtgcatatgccgtgtgacggccatctgcgtgaaatgatctatgtcccgggcgacctgttctccgttaacccgctgaccgccgccaatgtcccgaacctgttcgcccgtaacgagcgtctgatctgcgtgtttgacacggatttcggcccgatggtgcagattctggtgggcgccacgattgtcggcagtatggaaaccgtctggtgcggtatggtcaccccgccgcgtgaagggattgtccgccgctggacttatccggcacacgacagcgtctgtgcggtaaacctgaaaaaaggcgaagagatgggccgctttaagctcggctccaccgtgatcaacctgttcccggcggatacagtggcactgaacagtgcactggcaaacggcgtttccacccgtatgggtgaactgctggccacccgcattacggcggatgatgccgcctgcgcggaagaaagccctgcatgcccgtcacaaccggacgccgctgccactaactgaggactctcccctgtgcgcctgattatctcatttttactggcggtttttcttttctccccgctgacagcggtatatgcggcatcggatattaacgagccgcagatccgccaggaactgaagcggattgagagcagtaaagatccgaaagatattgagatggctcaggcgttacaggcgaccctgaactggctgacagacagcaaagctgcggatgaacgcgcacaaagctatcaggacaccatcgataacttcccgaagctggtcagggcattacgccagcaactgctggaagagagtgattccccggccaaaattctgaccacccgccctatcagcgaccttgagcagcaggctatccagctcagcggacagttactggagcagggacggctgttacagcaggagcaggacaaaaaccgcgaaatcagcgattctctgaccctcctgccccagcagcagtccgaagcccgccgtctcctgaatgaagccacctcccgccagcagggactcgcaaccccgctgaccccgcttgccgaagctcaggccacgctggccgccgcagaagtgcaggcacgcaaggcaacggtcaatgagctggaactggctcagctatctgccaataaccgccaggaactgacccgcatccgccttgaactgctgcgtaaacgctatcagcggctggatctcgaacttcagcagttgcgcagtgtgctcaacggcaaacgtcagcagaaagcggaactggcgctggaacgcaccgaactgctggccgaacaggccggtgatttaccgccgtacctgaaagaacagattgatattaaccgcgaactgtcgcaggtgctgaatgatcaggccgcgcacatgagtgatatcggagagatgcagcgccaggcggcaaccgatatccagaaagcgcgtcaggtactcggcaccattcaggagcaggcacagtggctgaacggctcaaccgcactgggggaagccctgcgggcacagctcagccgcctgccggacatgccgaaaccgcagcagctggataaagagattaccgacctgcgtgttgagcgtctgaaatatgaaaatatgctcgatgccctgtccggtaataataatgaaccggatacgtcacaaacagcctccctcccgccggatcaggcttccctctatcagcagctgattcagaaccgcaaagagctgctcggctccctgctctccggttacgatactgaaattctggagctgaccaagctcaaagtgaccaccagtcagcttagtgatgtgctgattgaagtccgcgacgacacccaccgctatctgttctgggtggcggatgccacaccggtttacctcaattacccgattgaggtactgaccagcctgaccaagctgctgtccctggataccctggcgcagctcggcggtgcatttaaaaccatgttctcgtggcagaacaaagagatttcactctatattatcagcaccctgctgctggcgattttcggcctgaactaccgccgccactatcaggcatttctggacagaaccagtcagcgtatcggtaaagtaacactggatcgcttttccatcacactgcgcaccctgttctggtctgtgcttgtctctctgccgctgccggtactgtggtccgctatcggctacgggttacagaattcctggcagtacccgatggcaaaagcgatcggtgacggtgtcagcgccaccacaccggtgctgtggctgtttatgttctgcgcaacctttgcccggcctaacgggctgtttatcgcacagttccgctggccggaagcccgcgttaaacgggcaatgcgtttctatcagctttccatttttgtcattgtgccgctgatgatggcaatgaccacctttgaatacttcaatgaccgagagtttgccccgacactcggccgtctctgcttcctgctgctgtgtgccgcgctatttatcattaccagcagcctgcgccgtgcgggagttccgctctatcttgaccgccacggcagcggcgacaatgccgtcagcaaaggaatgtggtggctgctcctgctggcaccggtagtggcggcgattgccgctctgctcggctatctcgcgacttcacaggcactgctcggccgcctggaaacctcggtcgccatctggtttatgctgctggtggtctacaacattatcacccgctggatgctgatccagcgccgccgtatcgcctttgaacgtgccaaacagcgccgtgctgaaatcctggcacaacgggcaaaaagtgatgatgacagcagcgtcaacagtaatgccaacagcgcggaaggtgtgattgatattgaagagcaggtcattgacctcgataccatcagtgcgcagtcagtcgggctggtccgttcgattctgaccatgattgccctggtatcctgtattctgctctggtctgaactgcacaccgccttctccttcctggaaaatatccggctctgggatgtcagcagcagtatcaacggtgtggataccctccagccgattacgctcggctctgtctttgtcgccattctggtgattatcatcaccacgcagctggtgcggaaccttcccgcattgctggaactggcgctgttacagcatctcgatctgactccgggtaccggttacgcgattaccacgctgaccaaatacagtattaccctggtcggcgggattgtcggcttctcgctgatcggcattgaatggtcgaaaatgcagtggtttgtcactgcaatgggtgtcgggctgggctttggtttacaggagattttcgccaacattgtttccggcctgatgatcctgttcgaaaaaccgatccgtatcggcgataccgtcaccatccgtgacctgaccggcagcatcacgcgcatcaacacccgcgccaccacgctgacagactgggaccgcaaagagattatcgtcccgaacaaagcctttattaccgagcagtttatcaactggtcactctcagataccgtcacccgtatcgtcctgaccatcccggtcccggcggaagccaatccggagcaggtcactattctgctgctgatggcggcacaggactcggcaatgattctggacacgccaaatccggaagcttatctggttgatttacaacagggtattcagattttcgaactgcgcgcctacgccgctgaaatgggacaccgcctgccggcgcgtcatgagatccatcagaatatcctgcgcagcttcgcggaaaacaatatcatcctgccgttcccgccatttgaggcgcgtgtggatatggtgggaaatattctgcgcagcggcacaaaaaatctgtcgggccgtaacccgatgcggaaatccggcgggttgtgatatcacagatagtgatccactccgccgtgatgtgaacaggtgccgcgtccttttgaggtagaataagagccgtctctgtacacagcttttatattcggatcgttcggatcataagtaatataaccgaatgcactgaccgaaaaggtaaagcacacaagcaatactatttttttcacctgatatttcctgatagtcagtatttattattgaccatacttctgattcaaatcatccggaacatcttcgtcatattacatccttgtttatccgtaatcgtttttatataacagaaccgccccccggatactacaggaacagctcacgctttgttcatttccggggtcagtatcacgtatgccacagagctctcattttttataaaatcacttcttcacgtaaatttatacctgataagcaatattaatgattgcgccgtttgcttcataccacgtttaatcatgattattgctgtccgggagaaaatttttctcctgatatcactttacctctctctaaaaagcattattttttctgatttacatcctttatgataaagatattaaaaaataagcctgctgataacaaaacgttattacataatacgttgtttaaatcgcacccgttaagaacaacattgtttaagatttaaacattaaggatgttatttatggcgataaatacgacacgttccgcagcggaaaattccggaatgagtgaagagcagtggcgtgcagcgaccaaatttgatggtaccgacgccggctgggttattatgagcatcgggatggctatcggcgccggtattgttttcttaccggttcaggtcggtctgatggggttatgggttttcctgctatcctccgttatcggctatccggccatgtatctgttccagcggttatttattaacacgctcgcggaatccccggaatgtaaagactatccgagtgtgattaccggttatctcggtaaaaactgggggatattactcggagcgctgtattttattatgctggtgatctggatgtttgtttattccactgccatcacaaatgacagtgcgtcttatttccagactttcggtgtgacagaaggattattatccgacagtccgtggtacggattaattctgatttgcctgctggtcgctatctcttcacgcggcgaaaagctgttatttaaattatccagttttatggtgctgaccaagctgtttattgtcgccgcactcggtatatcgatggtgggcatgtggcacctgtataatatcggctcactgccgccggttggccgtttaattaaagaagcggttattacactgccgtttaccctgacatccattctgtttattcagactctcagcccgatggtcatttcattccgcaatcagaatgtgaaccgggaagtggcccgctttaaagccctgcgggcaatgaatatcgcctttattatcctgttctgtaccgtctttttctatgccgtttcctttaccctggcaatgggtcatgacgaggcggttaaagcttatcagcagaatatttccgcactggcaatcgccgctaaattcttccccggcggctgggtaactgtggtcagcgtaatgctgaatatttttgcggttatgacggcgttcttcggggtatatctcgggttccgcgaagccacgcaagggattgtgatgaatattctgcagcgcatgatgcctgcggagcggattaatgaaaccctggtgaaatacggcattatggtatttgcggtgctgctggcctggggcgccattattctcaacgcaccggtactgagctttacctcaatatgcagtccgattttcgggatggtcggttgtctgattccggcttatctggtttataaagtcccgatgctgcataaatataaaggcatctccctgtatctgattatttttaccgggatgctgctctgtgtgtcgccgttcctggcattttcctgataatactcccagaaacaaaaaagccgccggatttattttccggcggcttttttgttgatctgaatataaaaattactgctgatataaccggcgcagataatgagcaaccgcatcatccgcattagagccaatcacttccatttccggcagaatatctttcaggcgctgatgtgctcccgccataatgcagccttttccggccatttccagcatttcgcggtcattcataccgtcaccgaaagcaatgcagtcattcaggcggtagcccagtgattccgcgacctgctgcagcgcctcacctttagagacacctccggccatcacttccagacagctgcgcagagagaaactgacattcactttattgccgaaacgcacgcggattttggcttccagcgcgacaagtttctcgtgatcgtcacaggtaaagtagactttgcagacctgatcaaccggaaaatcattacggtcaaacagctcatacataaaaacagattcctggaaaaactctttctgttccgggctttcccggttgatcatccagccgtcaccccggtaatagttggtgaggatatccgggttatcaaactccatcaggcacagctcgcggaccacatccggatccacatcatgactgaataccagctcacctttggtgttgtgtacccgcgcgccgttggaggtgatcataaacgcgtcaattcccagtgcatcacggatctgcgccacatccacatgatggcggccggtggcaaaaacaaaatgcacgcctttattgatggtcagcaggcggagggtttccttggtgtagggggtcaaactgtgggcaggtgataataacgttccgtctaaatctgaagcaaccacatgatacatatgcaaattcctgaaaattgattagtggagtccgaaaaaatgacaaatcgcattgagcgcgacagcgcgcaacgcgtcttcttcgaacaggatctcgtgataagctccctcaaacgtcagaggcatatgttcttcttcttgtcctgtccgggctttacggcgcttttcgcagaaagccagcaactcccgattgtccaccaccttatcctctgatgccatcagcaccatcagcggggtgtttatctctcccgcctgcgcaattatcttttgtccgatatcaatgctttcgcgtaaccagtgatacgtgggtccgccgagacgtaaagcaggatagtcagcataacagcgcaggtaacgccggtaccgcgggtaactgtgggtcagcatgttgattaaaaacggcaacggctgccacttcccggttgataccgcatactcattgcgttccgacggccgtttatcagcccggttcacaatcatattcgccagccacatcggcatcggtaaattgataccgaacatcggggcacataataccgcggcacggaaggtgtccggctcgcgcaacagataaccgcccagtatcgcaccgcccatcgagtgcgccagtgcatagcggtaagcgtaatttttctccgccagcgcgatgttggtgaactgagaaaaatcatcaatatagtcgtcaaaacgctcgacatggcctttttgcggatcatccagcatccgcccggaaagcccctgcccccggtgatccataataaagacatcaaaaccgaggtggaaaaaatcgtacagaacttccggatatttgacgtagctttcgctgcgtccggagctgatcaccagcactttgtcatgcgcaggatcggtaaactgcacatagcggatagtgacatcatccgtgccctgaaatgtccgctcatcccggttgctccagaaatcaagtaacgggccgttcacaaaggcggaatactccgcttcgcgttccagccagcttgctttcagggtatccggtggcagcatagggtgctcctttagtcatcaaatccggtgagatgctcgcggataagggccataaatgcatcgccgaatcgttccagtttccgctctccgacgccatttatcaagagtaaatcatttgccctgaccgggcattgttccgccatttcaatgagtgtggcatcgttaaacaccacaaacggcgggatattttcctcatccgcaatggatttgcgcagcttgcgcaatttcgcgaacagttttttgtcgtaattaccgccgtagctgcgggcagtctgacgcggtttgatattctggatcctcggcaccgcgagttgcagcggtacttcgccgcgcagaaccggacgggcggattcggttaattgtaacgcagaataattggcgatgttttgcgttatcagccctaagtggatcaactggcgcagcacactgacccagtgttcctggcttttatctttgcctataccgtaaaccgcgagtttgtcgtgtccgtattcacggatccgctgattattcgagccgcgcagcacatccacaatataccccagaccaaaacgctgcccggcgcggtagatgcaggacagcgcctgctgtgcctcaaccagcccgtcatactgtttcggcggatccaggcagatatcgcagttaccgcacggtgtctggcggttctcaccgaagtaattgagcaataccagacggcggcaggtctgtgcctgggcaaacgcgcccatggcattcagcttgtgctgttcgatatctttctgcggcccggccggtttttcatccagacaacggcgcagccacgccatatccgccgggtcataaaacagaaccgcttccgcactgaccccgtcacgtcctgcacggccggtttcctgataataggactcaatattgcgcgggatatcaaagtgcgcgacaaaacggacgttggatttgttaatccccatcccgaatgccaccgtggcgaccacgacctgtaagttgtccttgaggaaagcatcctggacccattcacgctgtgaattatccaggccggcatgatacgccgcgacactcagtccgcgcttttgcagacgggcggcgacatcttccactttattacggctgttacagtaaataataccgcactggcctttctgaccacggacaaacatccacagctgatcaaacgctttatatttttccaccagcgtgtagcggatattcgggcggtcaaagctgctgatgtggatcagcgggtcactgaggcgcagccgcgagcagatatcagaacgggtggtattatcggcggtggccgtcagggcaatcaccggcacacccggcagatgctggcgaagctcgcctatcgcgcagtattccggccggaaatcgtgtccccactgagagatacagtgcgcttcatccaccgccagcagcgacggctgccactgctgtaactggcggataaaactgctcatcagcaggcgttccggtgccacatacagcagtttgatgcggttattgtgacacccttccagtaccttctgctgttcctgcgcggtctgtgccgaattcagataaccggcttccaccccgagcaggcgcagctgatcgacctgatctttcatcagggaaatcagcggtgacaccaccactgtcagccccggcagcatcagtgccggaatctgataacacagtgatttcccgccgcccgtcggcatgaccaccagacaatcgcgtccgccggtcacggtatcgataatatcggactgtccggcacggaattgctgataaccaaagacctggcgcaggatagcgtcagcgtcgggcagggtattgatgacttcagcggtagacacgcagctcctcaggtgaaacagaaatccgggcagtgcattctgccggtgaaaagatgcttctatgctagctcagtttgccatcagataacagactatccgcacggacggtgataatattcgatcggtgctgagtttttttgcgcacaccttctggtgtaattttgtgatgcgcgttacactttcacatctttttaacgtctttgctgccatccggcgtatcgcaggcgatcacattttacgaataattaattaatgacgtgattattcacgttgtaactatgtagtatcaatgcgagagtgaccgcgccggcaggcatcttcttttcttctttctttcagacttggactatcatgagccagcaacagaccgtaaaaggcgtcctttgtgctctcggcgcttactttatctggggtattgcccctgtgtatttcaaactgatccaacaggtgcctgcggatgagatcctgacacaccggattatctggtcattcttttttatgatcctgctgatcaccgtgtcacgccagtggccgcgtatccgccagattatccgccagccgaagaagatcatgatcctcgcgctgaccgcctgtattatcgcctctaactggctgatctatatctgggcggtgaaccacaaccatatgctggaagcgagtctcgggtactttattaacccgctggtcaacgtcctgttcggaatgctctttctcggtgagcgtttccgccgtatgcaatggtttgccgtgtgtctcgcctttaccggcgtgctgatccagctctggcagttcggtactgtgccggtgatcgggctgagtctggccatgacattcggcctgtatggtctgctgcgcaaaaaactgggggtggatgcccagggcggaatgctggtggaaaccctgtggctgctgccggttgcgggaatttatctgcttttctttgccaacagtgccaccagcaatatgaccatgaacagcctgacgctgaatctgctgctgattgccgccgggattatcaccaccgtgccgctgctgctgtttaccgaggccgctaaccatctgcgtctctccacgctcggcttcttccagtacatcggtccgaccctgatgtttgtgctggcgaccaccgcatatggcgaggctatttccgccgaacggctggtaaccttcgcctttatctgggcgggactgattgtctttaccctggatgcactgtacacccagcgccaccgctacaaaaaagcgtgatatcctgtgagacagcgccggatctgccggtgctgtcaccgggaggataaatatggactggatcacgcatcatctggcggtactgcacgaccacccgctctggctgctggccattctgtttgttatcgccctgagcaaatccacgattattctctcatctgtcctgccgcccgcctctgtcatgctgatgacggtagtgacgctggcatttccggtcgttccggtggtgattatctggctggtgattacgctgggtgctgcctgtggttcgatgatttcgtattatctcggccgtctgattatcacccgcaactattttccggggctgatggcgaaatacaaaaccgccctcggtaaagcccaggcacggcttcagaccagcgggctgctgatcctgtttacctcacggtttattgcggtgctgcgctatctgatcccgatggcggccggattgctgcgtttcacacagacccgcgtgctggtaacctgtctgctctctgccggggtctggacagccctttacatgctgattgcaaagggcattgaattcacatttttctgaggttggatgttacagccaattcttgcgtttgaagtagagatacggcgcgagtgcagcagcaaccatcaccccgatcgcagcgggataccccagcgaccagtccagctccggcataaatttgaagttcatcccgtaactcgatgccaccagtgtcggcggcaggaataccacagaaacaacggagaagattttgataatgcggctttgttcgatattgataaagcccatcgccgcctgcatcaggaagttcactttctggaacagggattcattatgcggcagcagggattcgatatcgcgcaggatttcgcgtgcctgctccagctgattcgccggcagacgggtacggcggaccaggaagttcagcgcgcgctgggtatccatcagacacagacggactttccagccgatatcttcctgctcggccagggcagacagggctttatcgaactcatcatcctgcttgcctttcataatcgcccggctgagtgtttccagattgctgtagatgttttcgatttcatccgccagctgctcgattttggtttcaaacagatccagcaggatttcgtaaccgttgccgtcctgcatggtctgtttgcgcgcgcgcatacggtacaggcggaaagcaggcagttcccgctcacgcagcgtgtataaacgcccgtcacgcagggtaaatgccacagtggagtttccggcgtggtcgtccgcatcttcgtaatagaaaaaggagtggacgtgaagcccgtcatcgtcctcaaagaaacgcgcggaggcttcgatatcatccagttccgggctggttgccagttcctggttgaactgagtctgaatcagctgccgttcatgctcttccggttccgaaatatccacccacagcgcatctgtcagggcgtcgccctcttctaaatcaagacgttgcaaacgcttattgtcaactctgaatgcgctcagcatggtatgcggcctccgggaacgaaaggaaaagaaaaagtgtgcgcatgttatgcgcagatgaaaaagggtgtcaaccggttattatccgattaacaccttactctgcgggagatcagggtttttccagtttggcgtaggaggccaccagccatttgatcccttcaccctggaaggctatctgtaagcgggtatgctcgccgttaccttccatattgatgatagtgccctccccgaatttcggatgacggacacgctgcccgagggtataaccgctgtcattggcggtgatcggtgtgccgagccgctgatgattaaccgggcgggatacggtagcacgcaggcgcacttcctccacacactccggcggcagttcaccgataaaacgggatggccggtgatacacctctttgccgtacagacggcgggtctcggcataggtcagagtcagcttctgcatggcacgggtcacaccgacataggccagccgccgctcctcttcaagacggccgctctcctccatcgacatcatgcccgggaacatgccctcttccaccccgacgataaagacctgcgggaactccagccctttggcggagtgcagtgtcatcagttggacagcatcctgatagcggtccgcctgaccttcgccggattccagcgcggcatgggacagaaatgcctgtaacggcgtcagcccttcgtcagcatcctgatagctgaactggttggttgcggtcaccagttcctctaagttttcgatccgcgcctgggctttttcacctttttcctgctcatagtgcgcccgcagaccggaatcgcggatcacgcggtcagtctgcacatgcagcggcaggccgtcagtttcctgcgccagcagattgatcagctcgaggaagcgccccagcgcggaggcagcgcgtcccgccagtgctttttcttccagcagcacaccgcagctttcccagagggtcagttcccgctcacgggcagtctgacgcaccacgtccagggtgcggtcgccgatcccgcgtgtcggggtgttcaccacacgctcaaatgcggcatcatcatgacggtttgaaatcaggcgcagatacgccagcgcatctttgatttcctggcgctcgaagaagcgctgaccgccgtaaatacggtacggcagcgcggcctgtaacagcgcctcttcctgtaaacgggactgggcgttactgcggtagagaatcgcgcagtccgccagcgcaccgccgttctcatgccactgtttgatgcgtccgaccacataacgcgcctcatccagatcattaaaggcacaatacagagagataggctcgccgtcctcaccgtccgtccagaggtttttccccagccggtcgctgttgtgcgagatcagggcgttcgccgctttcaggatattgttggtggaacggtaattttgctcgaggcggatagtggtcgcgcccgggaaatctttcaggaagcgctggatattttccacctgcgccccgcgccagccgtagatagactgatcatcatcaccgacaatcatcactttgccggtatcacccgccagcatgcgcacccaggcgtactggatgctgttggtgtcctggaattcgtccacgaggatattggtaaaacggtcacggtagtgctgtaaaatcgccggtttgttgagccacaattcatgtgcgcgcagcagcagctcggcaaaatccaccagccccgcacggtcgcaggcttcctgataggcctggtagatccgcagccaggtggcttccaccgggttgccgtagctctcaacatgctgaggccgcaatccttcatcttttttaccattgatataccagcagccctgtttggccggccactgtttttcatcgagattcatggctttgatcagacggcggatcaggcggatctgatcttcactgtcgaggatctggaaatcctgcggtaatccggcatcaaggtgatgcgcccgcagcagacgatgtgccaggccgtggaacgtcccgatccacatcccgccctcactggtaccgaccagctcttcaatacggtggcgcatttccgccgccgctttgttggtaaaggtcactgacatcaccgaaaacggagaggcattctccactgccagcagccaggcgatacggtgcaccagcacccgggtttttccggaaccggcacccgccagcaccagcatgtttgagcggggagccgccaccgcttcgcgctgtttatcattaaggctttcaagcagataagagacgtccataatttccatcagtgttttgtgcggcagtgccgcgaaagaaaaagcgccttccggacagccggatccggaagaactggttttttatacagataaaattataacagtccggttaaagaatccaactgtgtaatttcaatatgcggcagcaggcgggtttccgggtcgtgataaacatcgcggccgtcaaggttgatccagcaggcctgcatgccgctgcacagcgccccttccacatcggtattcaggttatcaccgacatgcaggatattttctgccgggagagccagccgctgcgccgccgtgcggtacatatcgtagaacggttttgcgcgcccgtcaggaccggctttaagaataaaagtaaaataatctgccagcccgcatttttccggctccatattgccgttggtgatcgccaccagcggaattttggccgccagcgcagtcagcgtgtcatgcgtggactgtggtacatcaatacggctgcgccactgcgcaaaatgcgccattaccgcatccgccccggcctgagcacgggtggcggtatagccgtaatgcaggaaaaaagtacgccaggagagcagacgccagcggctgacatcatggaaaatctccggctgctgacggcggatccggtcacggaacacattaatatagtcagccggtaattcactgaaacgcggatcatactgacggataaacgcaatgacctcctcctcggttttatccatcaccggacgattatcatacagcgtgtcgtcaagatcgaacgtcatggcgcggacaggtgaaagggggcggtaaaaacgcattacggttttcctcgtttggcccgcggatgtgcaacatcatacacattggcaagatgctgaaaatccagatgggtatagatttgcgtggtggacagattagcatgccccagcaattcctgcacggcgcgcaggtcgccgctggattccagaatatgagtcgcaaaggagtggcgcagcttatgcgggttcagatggctgttcagcccctggtgcagaccccagtattcaaaccgtttctgcacattacgcgctgagatccgcttaccgcttttggtggagataaacaccgcccggtcttccggatcatacagctcacgcagcggcagccagcgttccagacaggcaaccgccgttttgccgagcggcactttacgctctttgctgcctttccccagcacccgtacttcaccggtggccaggtcaaaatccccggtattcagcccgaccagctccgataaacgcagccccgcgccgtacatcacttccagcatggtacggtcgcgcacggtcagaggatcattactgctgatatccatcagccgggtaatatcatccacatccatgtttttcggcagatgccgcccctgtttcggggcactgacagccttggccggattggcgggcagcaggccgttactgacctgccagtcaagaaatgaacggagagcggaaagacgcagcgccagactggcgggctgtaacccgttacggcggctttttgcggccagcatccgcactgttgccggttccagttgtgcccagcagcggagtttaccggcggccatcatttccgccagcgcggtgagctggcggcggtaattggtaatcgtgaccggacttaaccggcgctctacccgcagatactgcagaaactgttctgccgtgaccagcaggtcatctgccgcgctgtccgtcatgccagctccacccagcgctgcagcagctgcggcaggaaataggctacctgttccagcatcgcggtacccatatctttctgatagtgctgcttgtcacggctgacaaatatcactacaccgaggtcatgctgtccgcccagcagcgatacagacgctgaaccgacaaatgcactgtccggcagcagcagctgaatttcaggggctgtcagttgtcccagataatggttgcgatccccgaagcgggagagacggatggcttcaaagtgtgcgcgggataaggccagatcctgatgacggaacggcgcacccagccgccagctgtcagtaaacagacggattctggcatgactgagtttcagccccttcgcccactgattcaggcgttcggaaaaatcatcaagagaagtcgcggcggacagcgacgccagcagtttcagcaggcgcgagaacaggtgttcgttttcacgggcctgtatcatcagctgcatcagatcatccgtcagcgtgcctatccgctcacgctggcgtccgagctgccactccaccagagagaccgcaccttttaccgggtgcgggatggtcatgtcagtgatctgcgcggcattgcggatgaaaaaatccggatgcgctttcagatacgccagcaccgcctcctcatccggctctccggaaggggcaaatacggccgtatcctgttgactgtccattgctatttatcctctttatgatgattaaagatggataacaccatcatatacatgcgtggccgggccggtcataaacaggggttttccctcaccttcccagctgataaacagggtaccgccgggtaaatccacctgcacattttctgccagcaggccctggcggatcccgacagaaaccgccgcacaggcgccgctgccgcaggcctgtgtttcaccgacaccgcgctcgtatacgcgcagacggatatggtcacgcgacaggatctgcataaagccgatatttgcccgctccgggaaacgctcgtggctttccagaacagggccgataacctcaacttccgccgtttccgtgctttccacctggataacacagtgcggattgcccatcgacaccacaccacacagaaccgtgcgttcagcggcgcggataatataggttttctcttctttgaccgcgcggaacggtaccagcgccggttcaaactccggcacacccatattcacgcggacattgtcatcatcggcaatcgtgagcaccatgcgtccggactgcgtgctgacacggatatcccgtttgttggtcagccctttgaggcggacaaaccgggcaaaacagcgcgcgccgttgccgcactgcgccacttcactgccgtcggcgttaaagatgcggtagtgaaaatccagttccgggtcatagggcgcttccaccaccagcagctgatcaaagccgacaccggtgtgccggtctgccagacggcagataagctccggagaaaaatagatattctgggtgacggcgtccaccaccataaaatcattacccaggccgtgcattttggtgaactgcatgttcagatcctgtttacgcctcagtaaccggggttatccggtggtcatttttgcgttttgccggtctcagcgttgtcagtctgcacagcagactgctctgccgcaggcttggctgcaggcgcgcttttcgcggcggcaggctcttccggcgggaagtaaagcgggcctttcagtccgcagccggacagggtcagcagcatcacggcggataccgcacagatcatttttttcttcatttacagtcatgcctgttaatcatcggtcaataccctctataatcgcagttagatgtcgaaaagcaaataggaaatgacgatgaacgatacagaatttcaccggacagccgatgcgttgttgcaggatattgaagcaaaattagatgattacgacggtgatgcggatattgactgcgaaaccaacggcggtgtgatgaccctgagctttgaaaacggctcaaaaattatcatcaacaagcaggaagcatttcatcagatctggctggcggcacgtaacggcggctatcattttgatctgaaatcagataaatggatttgtgaccgcagcggcggcgagctgtttgccatgctggcacaggccatcaacgagcagagcggcgaaccgttcagcttctgagagtcagactgacggcacaggttctgtgccgtcgcatatcagccgcgctgcccggcggcctgatactgtaacggccggacatcagcatgaaaatccggatacgcggtatcacgcggctcttccgcaacaggctgagagaacatcgtgctgtggaacggcgtaacctgtgttttaccgtccgttttcaggatctgataaaactgcggcagattgaaattaataaaactggaaccgtaagtgaagcggtcatgagaagaggaatagaaccggctgacatcccggatcaggtcttctttgctgccttcacagccggaatagatttccacccggtttgattcatccagcacataaatattgaagccgttatcatcacggttttcaaagaagaactgaataatcccctcactggcatagccgtccaccacatccggcagatgaccggtttccgtgctgattttcaccggaaacccgcgcagtttgttgttggaaatcgcaccgtagaattccacagcattttccagtttctgcaccgagacgttaaggcgctcaaagaacagcccccaggtctgaccggccagacgcagtgccttaaagcggcccggatcctgacggttggtggtcaggcgcagttcaatacattcggaaaccagctggcggatgcgggtgctgatcagcccgcgcagatggcggctgtagcagaatacttccacgccggacggcggtgcggcatcctggtgcatcttgccgagaatggttttcagggcttccagcaccgactgttcaccgctgaaatgcagtgtgcgcacttcattccaggagttgcggtacagcagatcaatactgccgaccaggcatttctgctcctgaccgaagctgaacacatccagcttgctcatatcaaaatgcacgacctgctcggcgaaatctgcggtcggatcctgctccagattgacaataatcgccagatggcggatttcacacgggctgtacagcgcacgcggtgtcggggcaggcaggcggatagggaaattctgcgatacatcatgcaccagttcgtgcagtttctgctcgtcgcagtgtgactcaccgttatgaatatagacgcgggttctgtcagtcagcaggccgttgaagtaagtccaggagaccagcttattcagatagcggttatattccagcggctgatggccgatgatggtatggattgtcggtgcctgattatacagataccagccgctgcggttagcgcggcccggcggaacataaataaaggtcagattctcttctgacaagtccggcgaaatctgcggattgaccagggtgactttccccggcagcgcctcgaaagcggcatacagtttccgtgtcagcaccccgatatcctgcgggctggcactgacactcagattattgcggcgcgcaaagcggataaggttgcggtagctctgcatcatggtgtcgagcagctcattgtgcgcatcccgcacctgctcaattttccaggcattacggcgatccagcaccgccagccgttccggggaccagccccagcctttcaccatctcagacagtacctggcagcgccagccgcagcaaccgcatgatgcacgttcactgacatccgcaggtggcttctcacacactttcaggtagaaacagcggcggatcagatcaaggcgggtttcatcattgatagctttcagataacgggtgacgcggtcgagcatcatcgcgtaagcatccaggccgtggtgaacaatctcaccggcatgcagatgctttttaaactcagttgccagaagctgcccgttcgggtaatcccacgagtaagcttccagcagtaaacttttgatcacggctttatacggggaatccacactcttatagagctgccacagactggcaccgaagtactcttccgcggacaattcgcccagaccgcccagatccagccactcgttcggggttaatacaccctgcgcataaagggagagaacatattcatcatagtgatgttcttcttctgccggaaccatggtccacagcagacgcttaccggccatccgcacggcggtccggtaaaattcatcgagcagtaaaatatgctgggtcgagccgcagtcctcaccgttgaggctgccgctggcattgtggcggaaacggttttcatcgatcaggaagaaagtgacatcgataccttttgcggctgcccactcttcaatcagtgtgcatttgcggcgcaggttctgtttttcatcgtgatcaagccaggactgatgacagacccagatatcgagatcagaagagtggctctggccgacagacgaggtgctgcccatggaatagataccggtaatcggcagttcgccgccggcattgcacggcagacactctccgtgctgacgggaaaactccgccagccagtgtgactggtaatcatcggacgcccagaaacagacaccgtgcggcacattacccggcacatagcccggcatatccggatggtgatgatgcagcagtaccggcagcagactgtacacgtctttaaacgcacgactcatcccgatggtcgcgcgctcagatctgagctgatttattgcatccaaacgctgcttgagtgtttcaatataaagatacaaaggattcgcctgatgttatttcatgtaactggaaacgacctgatgcccggctttatacgtgtatgaatacagactgataaggtaatactgaaaaatgataagaatcgaaccaaagttaaattgccggaaacgtgatcaatctaacaccttcgggccaaagggtaaagcttcgcactaaaaaaggcacgattactcaaagttgttattagccagataactaattgtaaaatatatattttcgttgaaaatcaccgggatacacacaaaaaatctaaggaaatattcgggaaaaccggtgtgtttctgtttttgtacactttttaaccgaaaaagtaatactgcttactcactcagggcgtttttatttattttaataatgctatgaaatagttatttaaattgaatcgatttaattaatacaattttataattgcaaaatatttttattatttaaaatatgttttaattatttactgacagactcctgccacccgcctgagactatttattcactgctcgtcttttttcgttgttatctgccgggcaggtctcgtcacgtaactggaaaaattatcagcaaaatgataaaacaaaggcagtttttcttatttttccggctatgtttcacataaaaaaacaccggataaaaagacaaggatccctgataattatcatgaccactcaatctctgcgtattgccacccgtcaaagcccgcttgcactgtggcaggccgaatttgtcagacaggaactggaactgcgccaccccgggctgcacgtcgagctcgtcccgatggtcaccaaaggtgacattattctcgacacaccgctggcgaaagtcggcggcaaagggctgttcgtcaaagaactggaactggcattactggaaaaccgggcggatatcgccgtgcactccatgaaggatgtcccggtcgatttcccggacggactgggattagtcactatctgtgagcgggaagacccgcgcgatgcctttgtttccaaccattatgacagtgtggatgccctgccgcccggcagtatcgtcggcacctccagtctgcgccgtcagtgccagctgcgcgaacgccgccctgatctggtgatccgtgacctgcgcggtaatgtcggcacccggctgggcaaactggataacggcgactatgacgcgattatcctggcggttgccgggctgaagcgcctgaaactggatgaacgcatccgctgtgcgctgccgccggaagagtcccttcccgctgtcggtcagggtgcggtcgggattgagtgccgactggatgatgaacgcacccgctctttactcagcgccctgaatcacgcgcagaccgatatctgtgtccgcgctgaacgcgccatgaatacccggctggaagggggatgtcaggtgcctatcggcagttatgctatctggcagggggataaaatctggctgcgcgcgctggtcggcgcaccggacggcagtgaaattgtccgcggtgaacgcctgtgcgacccgcaggatgccgctgctgccggggtttctctcgcagaggaactgctggataacggcgcacgggctatcctgacggaagtctatcaggggcacacgcctgcatgaccatcctggtcacccgtccctcaccggccggtgaagccctggtcagcgccctgcgctcacgcgggcaggatgccctttctgccccgctcatccgtatttccccgggacatgagctgccgctgctgattgccaaaacagaggcactttctcccggagatgccctttttctgctgtcaaagaatgcggtttatcacgcaaatgaacagcttattcaacagaattacctgtggtctgataagctttgctattatgggattggtcagtcaaccgctaactgctttgaacaactgaccggattacccgccgcctttatgcccggcggggaaaccagcgaacatctgctgaccctgccggacttacaggatatgaccggccgccgcgcacttctgctgcgcggtaacggcggcagagagcatctggcacagacattgcgcgaacggggcgcagtggtggattactgtgaatgttaccgccgcgaacctgagaattacgacggcggggaatgcgccctgttgtggcagcagcaacaggttcagacgctggtcgtgaccagcggcgaaatgctgcacctgctgcggcagctgataccggccgcgcacctcggctggctgctgcaatgccggattattgttgtcagtgacagactggcagctatcgcacaatcactgggctggcagaatattgatgtcgccgccggtgcagataatgaagccttacttcaggctcttcaatgaacagacatgggacgccacgaatgacggaacacgaaaaaaaacccggatcggctgatgtacctgagacacaggatgccgtaatcagtactgatccgcaggcagagaaaaaagacacaactgccgggaaaaaagcgaccgcaaaaaacgtcactgacaaagcggcgtctgataaaaaaccggcggaaacaccggcggctgacagcaaaccggctgataccgcgccgaaaccggcaccggaagcgccgcagtcacggaaaaccccgcctgccgctgaggaagaacagccctccggctttctgcgcggtgctatcgctctggctgtgatcctgctgatcggcggcggtgtctggtatgcctcacaggccggtactcagaccctgtcgaaaaacctggaagcggaaaatgcacaactgaaatctcagatggcgcagctgcagcaggaacaacagcagacacaaaaacagatgcaggaatttatcgcgcagcagtctgcactcagtgcacagcatcagcagcaggaagaggctctgaaacacgagctggatttactgcgcagtcgtgtcactgcgctgtccagtactgatgtgaaaagctggctgctggcccaggcggatttcctggtcaaaatggcagagcgcaaactgtggaatgaccaggatgtggtcaccgcgatggtactgctgaaaaatgccgatgccagtctcgccgaaatgaacgatccgggtctgctggatgtgcgcaccgcactgcgtaatgacattacggcactctccgccgtcagtcagatcgattttgacggcacgatcctgcgcctgaaccagcttgccggtcaggtggataatctgcgtctggatgacggcagccgtgacggcgcgccgatggacagcagtgacagtgaagggctgacctcctccgttgcggactggcgcactaacctgaccaaaagctggaaagggtttatgagtgatttcatcaccatccgccgccgtgacaacacctctgctccgctgctggcaccgaatcaggacatttatgtccgtgagaatatccgcgcccagttgctgatcgctgctcaggcggtgccgcgtcaccaggaagagagctacaaacagtcactggatgcggtctccacctgggtccgtgcctatttctctgacagcgatccgaccaacgccgccttcctggccgaagtggatgcgctggccgcccagccgatctcaatgagtgcgccggacagcctgaccagccagccgctgctggataaactggtacagacccgcatccgccgcctgctcaacgatgaaaccccgccgccggcaccggctgaggcaccgcaggaaacacctgctgctgcaccggcacagccggaagccgcaccgcaacaggagggataacagatgtttaaagtctttattctgtttcttatcctgattgccgggattattgtcggcccgctgatggccggacatcagggttatgtcctgatccagaccaataattttgatattgaaaccagtgtcaccggcctgatcatcatcttcctggtacttcaggcggttctgatgctgctgggctggtgctggcgtcgtctgaaaagcggcagctcccgcaccctcggctggtttggcggtcataaacgcaaccgcgcccgtgcgctgaccaacgatgcgctgctcaaactggcggaaggggatttccgtcaggtggaaaaattactgagccgcagtgcagataatgccgagcaaccgctggtcaactatctgctggcagcggaagcagcacagcagcgcagcgataatctccgcgccaatcagtatctggagcgggcttccgagctggccgggcgccatcagctaccggtggatatcacccgcgcccgtattctgctgagccgcgatgaaattccggcggcaagaaccgctatcgacaatctgctggaagtcgcaccgcgccatccggaagtacttcgcctggcggaacaggtgtatgcgcgctccggtgcctggaaatccctgatcgccattctgccgcagatgaaaaaatccggcgaatttacggatgagcaggtcgaacagactgaaatccgtgcctggctcggtatgatgcagcaggttgcggatcaggacggcagcgatgccctgcgtcactggtggaaaaatctcagccgccatctgcgccacaatccggagatggccgtggcggccgcgcagcactttatcgccggtgatgatatggcggatgcagaagcggtggtgctcgacggactgaagcgtcagaaagatcagcgcctgctgatgctgctgccgcagatccggacagacaatccgaaagccatccgcaaggtgctgaaccagatgcagaaggaagatgcggatcagccgctgctcaacagtaccctcgggcagttagccatgcaggaaacacgctgggaagatgcggagaaatactttaaatctgccctgagcgcccgtcaggacacgcatgatgccgcctggctggccgatgtgctggataagcagaaaaagtatgaggaatctgccatgatccgccgtaatgccctgctcaataccctgacgttaccggatgaaaaaacgccccgcgaataagcacaggcggattcttttttatcacacagagccaatcctgccggattggctttttttatgccggaacatcattaaaagggattgacggaatacattattgatggcaagaatgagacataaaaaaacacctatcgcgaaacgataggtgtataaaatacaatcaggtctacagacggatggtgcctcactcaacgttacgtcctgttggtgatgtaaagatttcgggatcttttacatcgataacccggacaataggcaccgaatttagctctgcgtcatctccgggtttatgaagcttacgcaaacataagaaatgagatgagcatctacaccctgatgtaatgcacaagacgtgccaacttttacgccttctcgatctcccacggttcccgtgggtttattttttttatcctgccttctgcttatcaatcactgatgcaaatctgtccgcagtgtctctgttttgcgacgttttctgacagcattatttaaatcgttatatatcaatatattaaatgtctcattttggcgacatgcattatgcccgttgtcgccggatctatacaataatcataacataatgatttatatcgaaattgtcagataccaccaatagcggcggttttacggaaaacgcgtgtgcttttgtctgcctgaacaccacattagcatcagcacaaaagaaacaaaaatcagctgcggaacgacagccggaagaaaagcaggacaggaaaaaacagaaaccgcagaaacgaaaaaaccccgctgtaagcggggctttctctgaatatggtcggcgagataggattcgaacctacgacccactggtcccaaaccagttgcgctaccaagctgcgctactcgccgaaaggctgacttttcatgatgatggtgcgaagggggggacttgaacccccacgtccgtaagaacactaacacctgaagctagcgcgtctaccaattccgccaccctcgcaggttcatcactacagtcatgttacatgttattaaatggggtggctaatgggactcgaacccacgacgactggaatcacaatccagggctctaccaactgagctatagccaccataacatcgcaacattttactacttacaacaacgaaatactataccgtaactcttacacgcataatggcgcgcccgacaggattcgaacctgagacctctgcctccggagggcagcgctctatccagctgagctacgggcgctttgcgccgttgcgggagaggatagtacggatttctcatccgtctgtccagtgctttttttcacaaatgtattgtttgctcagtctttacccgctttgctgataaagagagcattttcccgcaaaaagccgcccagacaggggcaattataatttattaccgtagtaataacccagaaatttcagcagttttaactgacggcggaagcgggtcggttgtgataacaggcggtagagccactccagtcccatgttctgccacaccttcggcgcacgcttcacatgaccggtaaagacgtcgtaagtaccgcccacgcccatatacagggcatccgggtggatcttacggcagtcgcgcataaagatttcctgtttcggcgagcccattgccactgtcacgatttttgcgccgctgtcgcggatacgctcaaacaggacatcacgctgttctgcggtgaaataaccatcctgcgtgcctgccagattgacattccactgtgctttcagtttggcttcggtttccgccagcacttccggcttgccgccgaccagaaacaccggcgtgttttcctgtccggcgcgttccatcagcccttcccacaaatccgccccggcaatccgcgagacatccgcctgcgggtatttgcggcggatagcacggacaatgctgatcccgtccgcatacagatattccgcgttgctcagcagtgtgtgcagcgcctcatcctgttcggcggtcataactttttcggcattaatggctaccagcgtaccggttctgatctgtccgtccttaaacagataatccagaaaatgcgcctgattccggaaaccctgaatcgggtggttacggatagaatactgcgggatagtttccgcgctgccggcatcagaagataacggttccatgctaattccttacgatgaaagacgggtgcgtttgccctttgaaatcacataatggcggataagtccggccgtttcgaacagccagtacagtaatttcgccaccaccagacaaaagccgaaaataagacagaaaaacaccacgcgggaaacgaatgaatccattccttcgcgggccagcacaatcatgttaaatatcgcgccgaaacaaaatgcatgcagaatggccgctttgtaacggtttgtctcccgtttacccagctcatacagccagtcgaaccatttgattatcagcccgaccaccaccgcaccgagcggaataaaccagaagccgcccatcaccaccagcgagccgatcagggtcggggatatcgccagcccggaatggttgttcagcacttcccaggtaaaatagtttgccgcattcagtacggtatccggccggtccggccacagccaggacgggataaatacatagaagtcacggataatcggcgccagcccctggaactcaattttgtcgtaattattcagcagcaggccgaggttttcccacggcgagaaggtatcgcgggtcagatagaggaacgtgtaaaacgcctctgccccgctgacatccaggctgtaacgtttgagtgccagccagaacatccccaccacgccgaagaccccggcgctgaccagcatccacagcgaaatccagccgcgcacaatgccgataaacaggaacagcgcaaacgcgataatgatgttggcgcgggtaccgccgacaatcacataggtcataatcccgaacgccaccgtggtgatcaggaagaaaatccagcgctggaatgtgggtttcaggaagaacaccaccagcatcgccgggataaagaagtagaaaaagcgctttaacgccacgccggtgacctggctcgagaaaatctgactgtaggttttcagtttaaacagcagcagcccgttttccataaagaaaataccggcagtcgcgacggcaatcgccgccagcagcagccaggtgagccgggtttctgttttgttcatggaaaacagcggcgtaccgctgtaaaccgcgtcaggtctgcgcagccgggttttatacgccacataataaatggcatagaaactgactgacgccagcagcgcctgtaacagcgcggacggcggcaccacctgtacatcaaactggaacaccagcgcaaaggtaaacgggaagccgaaaaagaaggtcagcagatagagcatggagaaaaagatattaaaactgaagcggacccggcggaattcacggtaggtcagcagcagaataaaggccagcgagataaaccagacggcaaacagcccgatgaaatcaaactgactcatgcctgtgtctcctgcgcagcggccagtgcctgctcccagccctgcacaaagttcgggctgaagaaggcaattttttcacggtcgagggcgaacagctgttccctcgcctgtgccaccacgtccggcgtcacgtcatcaccgtaaaacagaaccggcacctgctgctcggtcatatcctgccagaacgggttctgacggcttatcacaaacggaataccgaactggatcagcagacacagtgtgccgatcccctgctggcggttaaaaataaagtagccgaggtcacattgtttcagcagattcagatagatatcaaaatccatcttgtctttcaggatctccgcctgctgctgagggaacagctgctgcgcgaaagcatccacttccgcaatatagtccccgttgttttccggatagcccatcgggataatgattttcaccttctccccgaattgctcatgaatgcgcgtcagcgcctctttatggcggtttgaacggtcacccgagttacccagcaggatcatcatattatcgtcaccacgcggctcaggcggcgttaaaaccgtcagagagggatccatccgcgtcgggaaatagagcaggtcagccgggatcttcgggcaaaactgagcaaaatagtttaaatcgccgcgcgtgccgaatacatgaccgacccgcttctgcgccagccggcgcagatgataaaacagtctgaatttcagctgacgggaatcctcatacaaatccgcgccccagatatgccagtaaaactgatgacgtttaatttttcctgataataatgccagccagatcagggcattaaactgaccatggaagaaaaagcggcactgccggtcacgttttgctttcgctgtgacggcattcgccaggctttttttatccggccagacatccagttccaggttgggatattgcgccagaagctgcccggcagtggaaacaaccataaattcaggcatttcctcacgcggcagctgcggtgccagcacatcattgaagaagcgcagcacggtctggttatgatgcgggatatcagatcctaaaacgtgaattaaagttgtcatgctcgcctgcaatagatcagaaatacgctacaacacaaaaggaagtagataatatatgtcagcatataggcctgtgccgcgccgacggcaccatgtgccggaatcagccagtacgcggacagcgtcagtaaagcaaactgggtcacttccgtgaggatataaaaccgcagtgcggccttggcaatcaccagataaccgaaaacgtaagcgcccactttcaggacatcaccaaccagttgccaggcaaacaggtcacgcatgccggtaaatttatccgtgaacagcagccagatagcaaaatcacgcagcagccagaccataaaactggccgcagccaccgccggtaacacaaatttcagtgatttgatgatctcacggcggatatcactttttgcctgtaaccgcgataacgtcggcagcagatagacagaaaacgacgcggtaataaactggagataagcgtccgaaatactggtcacgccaccccatatccccacctcatcccagctgtagcgggaggccagcaggttccgcatcatgatatacgccaccggcagtgtgaccgccgtcatcagcgccatcagggtgaatttccccagatgggatgcaatcgcccgatcccaggccggtttcagctcagaaagcgggaaatggcggcggcgcagcagcatggcaaaagccggaataataatcagcgccggcaccagtgccagcccggccagtgcaccgtcatagccccaccagcgctggcagagataatacgccgtgacaccgatcagactgcccgcgatcagcgccagcgcattgccggccgcatcccggtatcctttgataatcgcgagaaaatagttggcgtaagcaatacccatctggataaaggccaccgccgcaacaacatcctgataggcatcattgccgtcaaacagcgccatgctgattggtctgctgaacagcagaaacacaatcgccagcagtgtcgaaaacaccagaatcagagttgaggacgtacctaataccgcccggcgtttttccgcatcatcacggtgctcggcgatatatttggtcacgccgttaaaaataccggcacctgacaatacccccagcaccgtaatcagctggcggaagttcagtgcctggccgataccggccgggccgaatgtcagagccattaatttaatgaccagcagccccgccccgattttgatcagggtggagccggcggtccagacagaggctttagcgagggacatactacgcgaagaagcccttaatcaggtggatcacgcgctgctgctcttcttctgtcatgttgtagaacatcggcagacgcaccagacgctcgctttcacgggtggtaaagatatcctcaccgtggaagcggccgaactccatacccgccgggcagctgtgcagcggcacatagtggaatacggtcagcacgtcattggctttcatgtactcgctgaatgcggtgcgctctgccacatctttcagtttgatgtagaacatgtgcgcgttctgttccagattttccggaacaaccggcagcgtcagcaggccatcctgcgccagcggagtcagggcatcatagtaaatctgccagaatgccagacggcgctcgttgattttttccgcttcttccagctgtgcccacaggtatgcagcctgtaagtcagacatcagatagctggagccgatatcacgccaggtgtatttatccacctgtccgcggaagaattcgctgcggttggtgcctttctcacggatgatttccgcacggccaatcatcgccggatcgttaatcagagtggcaccaccctctccgccggaggagtagtttttggtttcgtggaagctgtagcaaccgatatggccgatagagcccagcgcgcggcctttgtaggttgacatcacgccctgcgcggcatcttccaccacaaagaggttatatttcttcgccagcgccatgatgatgtccatttcacaggccacgcctgcataatgcaccggtacaatcgctttggttttatccgtgatagccgcttcgatcttggtttcatcgatgttcatggtgtccggacggatatcaacaaataccacttttgcaccacgcaacacaaaggcgttggaggtggagacgaaggtatagctcggcatgataacttcatcacccggctggatatccagcagaattgccgccatttccagtgaggctgtacaggacggggtcagcaggactttggcgctgccgaaccgtttttccatccactcttcgcattttttggtgaacgaaccgtcaccgcacagcttgccgcttttcatggcctgctgcatatattcaacttcagtgccgactacaggtggtttattaaatggaatcattgcatcctcggtataaccagtaggcagtgctgtcaaccgcaccaccgctttttgtataaaggcgcattgccgcaaggttactgagttgtgttgcaacccgtaatacacggcagtgatgttctgcacaccactgttgcgccgccgacattaatttcaggccgataccctgaccctgattgcccggcagtaccgccagcagcccgatacgggcgctgcgttcatctgtctgacggagagtgacaaacccggcaatctcattgtttttattgcggatgagcagacaatctttatcgaatgtcccgcgtaccgctttttccgcccacaccgcataaaagcgggcactgtcatccggccggtaccacggcgcacggaaacggctctggctgaaaacctgtgccgccgcctgttttatcaccgggatatccgtttcatccgcataacagagtgtactgtcagacattgcattttctgtgccactcctgagtgacaatgcaaaatccacctcactttctgcgagggaaaagccgagtgccgataaaccgtccagtgccgcgttatccccggcactgattttggcctgcaccagctcatacggcgcgaaatctgccgcagacagtggtgctgcgtccggggaaaatgccagttttgccgttttcagggcaaaaaagtcactttcccaggcgagatgctcaatactggcgcggacggacatggagtaaattcttcagatactgaccataaccggtcttcgccagctgacgggcggattctgccacctgttcgtcattcagccagccgttgcgccaggcaatctcttccagacaggcaattttaaagccctgacgtttttcaaccgtctgtacaaaggtgctggcttcaatcagactgtcgtgagtaccggtgtccagccaggcaaaaccacggccgagcagctcaacattcagttcgccgcgctccagatacatctggttgatactggtgatttccagttcgccgcgctcagacggtttcacctgcttcgcgatatcaaccacctgattatcatagaaatacaatccggtaaccgcccagttggatttcggatgaaccggtttttcctcaatcgacagcgcgcggaattcatcatcaaattccaccaccccgaaacgttccgggtccatcacctggtagccgaaaacagtcgcgccctgcgtccgggctgcgacacttttcagtttcgggctgaatgcatggccgaagaaaatattatcgcccagcaccaggctgcagctgtcatcaccgataaattcctcaccgatgataaaggcctgtgccaggccgtccggcgacggctgttccgcatagctcagagagatgccgaactgatcaccattccccagcagacggcggaatgacggcagatcttccggtgttgagatgatcaggacttcgcggatcccggccagcatcagcacggacagcggatagtagatcatcggcttgtcgtaaatcggcagcagctgttttgacaccccgcgggtgatcgggtgcaaccgggttccggagccgcccgccagaataattcctttcataccagcctcttacttatcctgacccagtcccagacgctgtccggcatacgagccgtcctgcacccggcgccaccaggtttcattattcagataccattccacagttttgcggataccggactcaaacgtttcctgcgggcgccagcccaggtcgcgctcaattttgtccgcatcaatcgcataacgcagatcatggcccgggcggtctgtcacataggtgataaggtcactgtatttcgcgacaccggccggcttctgcggatgcagctcttcgagcagctcacagatagtttccaccacctgaatatttttgcgctcgttatggccgccgatattgtaggtttcaccgatatttgcctgtgtcaccacggtatacagggcgcgggcatggtcatcgacaaacagccagtcgcggatctgctcacctttaccgtaaaccggcagtggtttgccggaaatcgcattgagaatcaccagcgggatcagtttttccgggaagtggtacggcccgtagttatttgagcaattggtgatcacagacgggaagccgtaagtccgctgccaggcgcgtaccagatggtcactggaggctttggaggcagagtacgggctgctcggtgcatacggtgtggtttctgtgaaaaagccgtcaggcccttcgaggtcaccgtaaacttcgtcggtggaaatatggtggaaacggaatgcggattttttctccgcatccagtcccgtccagtaatggcgcgcagcttccagcagtgtgtaagtgcccacaatgttggtttcgataaacgccgccgggccgtcgatggagcgatcaacatgactttccgccgccagatgcatcactacatccggctgatactgtgcgaacacgcggtcaagcgccgcgcggtcacagatatccacctgttcaaaggcatagcgcgggtcagccgccaccggtgccagtgattcgaggttaccggcgtaggtcagtttatccaccaccaccacactgtcagcagtatcacggataatatgacgaacaaccgcagagccgataaaaccggctccgcctgtcactaaaatacgtttcaacgccatactcctttggtatcgatgatccatttctgcgggatctggctgcccggaatgcctctgaacggcgtgtgatcgaccagcagcagaataatatccgcgtcagtaatcgctttttcgatggagaccagctctgtcagacctttcagtttgcccggcagttcatgaacattcggctcaaccgccagagttttccctgcatgccactctgccaccattttggtgacctgaaccgccgggctttcacgcagatcgtcgatatttggtttgaatgccaggccaaagcaggcaatcgtcacttcattggcacgtttgccggtttcagtcaggcaatcagcaactgcttgttttacctgatcaataacccacaatggtttgccgtcgttaaccagacgcgcagtgtggatcagacgggcctgtttcgggttctgcgccacgatgaaccacgggtcaactgcgatacagtggccgccgacacccggacccggctgcaggatattcacacgcggatggcggtttgccaggctgatcagttcccagacattaatgccctggtcagcacaaatcagtgataattcattcgcaaacgcaatgttcacatcgcggaagctgttttcggtcagtttgcacatctcagccgtacgtgcattagtgatgacacactcaccttccaggaagatataatagagtttactggcgcgttttgaggattttggtgtcatcccgccaaccacacggtcgtttttaatcagttcgaccatcacctggcccggcagcacacgctcagggcagtaggcgatatcgatatccgattcttcacccgcctgctgcgggaaagtcagatcaggacgtgccgctgccagccactcagccatctgctcagtcgcaccgaccggcgaggtggattcgagaataatcaggtcaccttttttcagtaccggggcaatagattccgccgcagactgcacaaaggccaggtccggctcatgatcacctttaaacggtgtcggtacggcaatcaggaacgcatcagcaggctgaggtttggtgaaggctttcaggaaaccgccttccacagctgttttcacaaccgcacccaggtccggctccacaatatgaatttcaccacggttaatggtatcaaccgcatgctggttcacatccacaccaaccactttcttctgacgggaggcaaaagctgccgctgttggtaaaccgatataacccagaccgacaacagaaatagtttcaaaactcataatgtcacctgattgtttttcaatgcttcaagaatacgctggcacgcttttccgtccccgtaagggttatgtgaacggctcatctcatgataagccgccggattggtcagcaatcgcgttacttcacgaacgatagtgccggtttcagtgccgaccagacgaacagtcccggcgtcaatcgcctccggacgttcggtggtatcacgcatcaccagaaccggtttacctaatgacggtgcttcttcctgaatgccgcctgagtcggtcaggatcatataagcatggttcataaggtagacaaaaggaaggtaatcctgcggactgatcagcacaatattgctgatatcatgcaggatccgttttaccggctcactgacattcggattgaggtgaaccgggtagacaatctggacttccggatgggtcgtggcaatctccgccagcgcgtgacaaatccgctcaaacccgccgccgaaactctcacgacggtgcccggtgaccagaatcatttttttgctgctgtcgataaacggatactgtgcatccagctgcgccagcagggctttgtcctgcatgatgcggtcacggactgcgagcagcgcatcaatcaccgtattgccggtgacgaaaatatgattgtcgcggataccttcacgcagcaggttttcgcgtgaattttgtgtcggcgcaaaatggtacatcgccaggtgtccggcaattttgcggttggcttcttccggccacggtgagtacaggtttccggtgcgcagaccggcttccacatgaccgacagggatacgctggtagaacgccgccaggctcgttgccatggtggttgcggtatcgccgtgaaccagaacgacatccggtttaaagtcggccagaaccggcttcaaaccctcaagaatacgacaggtaatatcagttaaatcctgtcccgggcgcataatattgagatcataatccggtgtgatctcaaaaaggtgtaatacctgatccagcatttcacgatgctgcgcggtcacacagacttttgcctcaaaagcctgatccgctgccagcgcatgtaccagcggagccattttgatagcttccgggcgggtaccaaatacagtcaatactttcactgagagtctcttttattttatatgatatccggctttccggccggtggcggttacccgccttaaaacaggccgggaacaacgccccggccggttattctgccgcaaccgttacggacggcggcggaccagcgccacaccggcaccggtcagagcaccgataaagccccacataatcatcatgaaggcacggcgcgggctgtcgcgttttaccggctcatccggtgtccgcagatagcggtaggcacggaagttatcttccagcgcgggaccgacattcagcgtcgacagcatggcaatgttctgctcgtaatctttgtcaaactccggtccggcggcttccagtgtctccagacgcgcctgtaacatcggcgtacctaacaggaacagctgggaggacggcagttcttccgcaggcacatctgtccggctgcggctgatcccctgtttctgtgcagccgcgatagcatttttcagctgtccggtttcacgctgatacagtgattccgccaccatcttctggcgtttgaccagtgctttcagtgactgtgaccgcgttgcccacgcccctttcagctcatcgttaagattctgagccgcacgcgcgttggcaaaatccacatactgactcagcagtttcgcggagtccgctgcagattccgctgtcagcgtcagcgtgtcattcaccagtttcttcgtatcatcacgcggggtcagcgtgatgttattgatcatttcgtccagcagtgccgcatctgctttggcatcattttccatgcgggacttgtagtaatccgtttgtaaccagaaatcacggcgggtatcataagatgccgcctgggtaataaattcctgataggcctcattcgggatcggcagcagtgctgaagattcctgagcggcattcagatgcgtgtccagattacgcataaattgctgctgggaataatatccgcctaaattattaacggtcggataatcagtgatcgccgtggaattccacttctgctgcataaaataactggcacccaatgcaaccagcgcaaacacaaccgccatcccggctatccataattttccgcgccataacgacataaataacgcgcggatatctaattcctggtcatactgcgtttgttgcgggtccggagtattttctgaacgcatatcaacatgtgcctctgtggttaaaaatttagtgtgtgaccgatttgcgacgcacgcggcgtctgtggcgtttgataaaacgggcaactttccaggcgcgttttatgcagtagccgtacataatgaaagcaagcaagaacagtgccagcatcacccactcagggacaaagctgaggacctgtccggcaataccaatggccgctaatactgccgcagcaagggttatcaccacaaaggattcacgggacgtaaacccggaacgcataatcagatgatgaatatgctggcgatccggtgaaaacgggctcatccctttgcgcagacggcggtacataatcgccaccatatccatcagcggaatggcgataatccacagtgcggtcactgcattaattgcatgcggctccccgccctgtgaggccgatgtcagcagccagataatggtgaacccgatcagcgtactgcccgcatcccccataaacactttaaagcggcggccgaacagtccgaggttaaagcagatatacggcagaatggcagcgataaaggtaaagcaccagaatgccaggccactgttaccgctcagggcaaacaggatccccaatgcgccgaaagagacacaggaaagcccgccgagcagcccgtcgataccatccaccatattgaacgcattcaccgcgccccataccgcaaacagtgtcagcacatagctgaacggcccgagtgtcagttcccacggcccgaatgcatgccccaggctgtcgattttcaggttggcaaacaccatcataatgatagcaaccactgcctgaacaccggcccgcagtttcacactgaggtcaaaccggtcatcgagcgccccgaccagcaccagtgcaccggcgcacccgagataaataaatttatgcgcaataaactcatcactgatgaggaaagcaaagcagacactgataaaaatcgatattccgccgaccagcgggaccagtccctgatgctttttgcggtaattgggtttatccaccaaaccgacagcgacgccagccttacgggcaacaaagaccgtcgctgtggcgaacacaaatatgattaggagttcagttaacatagtgagattcacaacaaccctttctgatatttttattatccctgccggccgatatcaccgtgcagaacctgccattaccgggcaaaataatatatgcaagaaacataccatgccttgccgcacaggggtttctgacataatcggtaaaaaaaaacgccacaatgcatgcggcgttagttataaagtgtcgtcaaaaagctacgagcgtttcatgaagtcgaagaactcttcgttggtcttcgtcatcgcgagtttgttaatcaggaactccatcgcatcaatctcacccatcggatggataattttgcgcaggatccacattttctgcagttcgtcctgagtggtcagcagctcttctttacgtgtaccggaacggttgtaatcaatcgccgggaagacacgtttttctgcaatcttacgggacaggtgtaattccatgttacctgtacctttaaactcttcgtagataacttcatccatcttcgacccggtatcaaccagcgccgttgcgatgatagtcaggcttccgccctcttccacgttacgcgcagcaccgaagaaacgcttaggacgatgcagggcgttagcatccacaccaccggtcagtactttaccggaggacggaaccacggtgttataggcacgggccagacgggtaatggagtcgagcaggatgatgacatcttttttatgctcaaccaggcgtttggctttctcgataaccatttccgcgacctgaacgtgacgcgcagctggttcatcaaaggtggatgcgataacttcacctttgaccagacgctgcatctcggtcacttcttccggacgttcgtcaatcagcagaaccatcagcacacagtcagggtagttatgtgcgatattggccgcgatattctgcagcagcatggttttaccggctttcggcggtgccacaatcagaccacgctgaccacggccgataggagcagccagatcaagaacacgggcggttaaatcttctgttgaaccattaccgcgctccatacgcagacgacggtttgcgtgcagtggagttaagttttcaaacaggattttactgcgggcgttttcaggtttgtcaaagttaacttcgttaactttcagcagggcaaaatagcgctcaccttctttcggcggacggattttacctgaaatggtatcaccggtacggaggttaaaacggcggatttggctgggagaaacgtagatatcatcaggacctgcgaggtatgaactgtcagcagagcggaggaaaccaaagccgtcctgcaatatttccagcacaccgtcaccgaaaatatcctcgccgctcttcgcgtgctgcttgaggatagagaagatgatgtcctgttttctcatgcgggccaggttttccagccccatattttcgccaagagtaatcagctctgataccggcgtattctttaattcggtaagattcataatggtgggttctttgactcggggtgtatctcgaattatgaacgtgaataatacggtaacgttatcgttaccaggttaattttttacaaaaccgattttcactgttaatacgaatatttttgcatttccaggtaatcgtctgcaaggctgactgtgaacacccggcacagggcaagatgtgatgcacatcctatttgggagaacaaattgggtgacattcccgcaaattagatttatctccgagggataaccggacaccgggaccgggatatcggataccttgatgtatccggagataacagactttcagacactacagagttgtcagtatgctatgctgtctgaggagcttcagcgatacctgatcagctggcgctaacttatcatgcttcagagaagacgtccagcgggtgaacaaggattaattcacgttcccgcaggacatcttaacgacatatgctgaaaccggctatcagatattgttatcgataaaggttttcagctgggttttggataccgcaccaacctgcgttgccttcaccacgccgtctttgaacagcagtaatgtcgggataccgcggatgccgtattgcggcgctgtctgcgggttatcatcgatgttcagttttgcgatagtgatttttcctgcatattcgtcggcgatttcgtctagaataggggcaatcattttacacgggccacaccaggctgcccaaaaatcaacgagcacagggccgtttgcttttaatacgctttgttcgaaaacggaatcagtcaggtgaataattttatcgctcattgttccactccaaaatttgtacgatacccggttagtctaccattatttaatgataggatttacctatttcagcgaatagacttccgtaacgcaacattaaactgatattctacctaaatatgagcaaaacacatttaacagacaagaagttttctgacttcgccttgcatactaaagtggtagaagcgcttgattctaagggcttttataactgcacgcctattcaggcgctgacacttcccctgacgatcaacggccgggatgttgcaggacaggcacaaacaggaacagggaagacgctggcatttctgacgtcaacgtttcatcatttacttacccatccggcaccggaaggccgcaaaatcaatcagccgcgtgcgctgattatggccccgacccgcgaactcgcggttcagatccattccgacgccgaaccactgtctcagcttaccgggctgaaaaccggcctggcttacggcggtgacggctacgacaaacaaatcaaagtgctggatgaaggcgtcgatgtgattatcggcaccaccgggcgcttaatcgacttcgccaaacagggccgtctcgacctgagcgccattcaggttgtcgttctcgatgaagctgaccgtatgtacgatctcggctttatcaaagatatccgctggctgttccgccatatgccgccatgtgccgagcgtatgaacctgctgttctccgcgacactttcctaccgcgtccgtgagctcgcatttgagcagatgaacaacccggaatacattgaaattgaaccggaacagcgtaccggtcaccggatcaaagaagagttattctatccgtccaacgaagaaaaaatgcgccttctccagacacttctggaagaagagtggccggatcgctgcattattttcgctaataccaaacaccgctgtgaagatatctgggcacacctggcggctgacggccaccgtgtcggcctgctgaccggcgatgtggcgcagaaaaaacgtctgcgtattctcgaggatttcactcacggtaatctggatattctggtggcaacggatgttgcggcccgtggtctgcatatcccgtcagtgactcacgtctttaattatgatctgccggatgactgtgaagattatgttcaccgtatcggccgtaccgggcgtgccggggaaagtggtcactctatcagcctggcctgtgaagagtacgctctgaacctgcctgcgattgaagaatataccggccatccgattccggtcagtaaatacaacagcgatgcactgctgactgatctgccggtgccgaagcgccgccgtcgtccgccgcgcaccgggggtggtcagaaccgccgtaatatgccgcgccgcagcagcaacgggccgcgtcataacaataaccgcaccaaacgctgaaggctgccatgctgagatcgtcctcgctttatgctgccatcgatctgggttccaacagctttcatatgctggtggtacgggagattgcgggcagtattcaggtactgtcacggataaaacgcaaggttcgtctggcggccggtctggataaagagaatatcctgtctccggcagcgatggcccgcggctggcagtgtctgcgtctgttttccgaacatctgcaggatatcccggattcccagatccgcgtggtggcgacagccaccctgcgcctggccagaaatgccggtgaatttctggaaacagcagcggagatcctcggtcatccggtcacagttatccggggtgaggaagaagcacgtctgatttatcagggcgttgcccacaccaccggcgggtcagacaaacgcctggtggtcgatatcggcggcggcagtaccgaactggtgaccggcagcggcacccggaccaccgccctgttcagcctggagatgggctgcgtcacctggctggagcgctattttaccgatcgctccctgaccaccgagaatttcgccggtgccgaacaggctgcccgcgatattatcgccccggttgctcccgcacttctggagcagggctggcaggtgtgtgtcggcgcatcaggtactgtccaggcacttcaggaaatcatgattgcccagggcatggatgaacaaatcaccctgccgaaactgcagcagctcaaacgcaaagcgattgagtgcggcaaactggaagagctggagattgaagggctgacgctggaacgggcactggtattcccgagcgggctggccattcttatcgcgatttttgaaacgctcggcattgacggcatgacactcgccgggggtgcactgcgtgaagggctggtctacggcatgctggaattgccggtagagcaggacatccgcacccggacactgaaaaatattcagaagcgttttcagatagatgccgaccagggtaaacgtgtccgtcagttagcggatcacttttttcagcaggtggcgaccgcctggcagctggatatccgctgccgtgaactgctcagcagcgcctctctgatccatgaaatcgggctgagtgttgatttccgcaaaggcccggaacatgccggttatctggtcagtaatctggatttacccggtttcacaccggcacaacgccgcctgttagcggtgctgttgcgcaatcagagcggcccgctggatatccattctctcaatcagcaaaatgcgctgacaccgcgtgaagccggttgcctgtgtcgtctgctgcgtctggcgattatttttgccagccgccgccgtgatgacacgctgccgtcactgcgcatccgggcgtctgcggaagggctgattatcacactgccggtcggctggcagcaattgcatccgctgcgcgcggaagcattacagcaggaaattcagtggcagagttatgtgcagtggtcactgatgctggaagaacagaagccgtccactctcggctgataaataataagccctgattatccgtttccggacactatcagggctttaattttatgagccttttcaacgtgatccggcttccgtcagtcattccggatcatcgtttctgctctgagtgattccctcatccgttttcttcctttttcttagccagcatcgccttcagcccggccacaccgcgcagcccggcctgttgtttctcttcggcggttttcaccacttttttgccgtcatcccagtgcagatcatcctgcggcagttcatagagaaaccggctcggttcggggcggatcagctcaccatactggcggcgctcacggcacagggtaaaaaagagggatttctgagcgcgggttatccccacataggccagacgccgctcttcatccacgttatcctcatcgatactggactgatgcggcaaaatcccctcttccatgcccaccaggaaaacatacggaaattccagccccttggaggcatgcagcgtcatcagctgcacctgatccaactcctctgcttcctcgccgcgctccatcatgtcgcgcagcgtaaagcgggtaaccacctgagccagcgtcatcggctcgttgagatcatccccttccagcatttcagccatccagctgaacagctgatcgacgtttttcatccgcatctcagcggctttcgggctggccgacgtttcgaagagccagctctgataatccaggccgtgcagtaaatcccgcaccgcgatcagcggctcgcgctcaaccaatttttccacctccgccagccagccggtgaaattcgtcagcaccgccagcccctgaccggaaagtgtctgccccagtccgaggtcaaaactggcctgatacaagcttttatcccgcgtattggcccactcacccagtttctggatagtggccggtccgatacccctgcgcggcgtgttcacgatgcgcaggaaagcactgtcatcttccggattggtcagcacacgcagatacgccagcaaatccttaatttccggacgggaaaagaaagaggttccgccggagatccggtacgggatccggttttgcatcagcattttttcaaagatccgcgactgatggttgccgcggtataagatcgcgtaatctttatagtcggtcttattgataaaatgatgggcgatcaactccccgaccacccgctccgcttcatgatcttcattattcgcggtgatcactttcatcggatcaccataaccgaggtttgaaaaaagctgtttttcaaatacatgcgggttattggcgatcaggatgttcgctgcattcagaatacagccggacgagcggtaattttgctccagcttgatcacccgcaactccggaaaatctttactcagctgcaccaggtttttcggctgtgcgccgcgccatgaataaattgactgatcatcatcacccacgaccgtaaaatacgcgcgtttaccgaccagcaatttcaccagctgatactgactggtgttggtatcctgatactcatccaccagcagataacggatacgctgctgccagcgctcccgtgcctgttcgtcacgggcaaacagcagtgtcggtttggtgataaggtcatcaaaatcaagcacattacagctgttcagatgcagttcataacggcggtaacactccgcaaacgtatgttcgcgctctgatcgcgccagcccttttgcctgttccggtgtcagcagggcgttcttccagttcgagatctgactgaccagttgttgcagcaactctttatcttcttccagatgatcaaacgtcagctctttaagcagcgcgatctgatcctgatcgtcgaacagggagaaattacttttcatccccagcgctttatattcccgcttgataatctccagccccagtgtgtgaaacgttgagatcatcagccctttggcctctttgcgccccagggtttgtgcaacacgctctttcatttcccgcgcggctttgttggtgaaggttaccgccgcaatctgacggggctgatagccggtattgcggatcagatgcgcaattttattggtgatcacacgggttttgccggaaccggcacccgcaagcacaaggcacggcccttgtatatactcaacggcctgctgctgaccgggatttaatttcatacgcgctgttaactcgactcaatactggaacaggagggaattgtagcagaaaggtacagcagaagtgtaaccggacgccgctcattaaaacggaaaacggcacccgaaggtgccgtctcatttcatcattaaacaattttgttatcagccgccgaccgcgatacgtttcatatccgtcatatagccgcgcagggttttacccacagtttcaatcggatgctgacgaattgcttcattgatatcacgcagctgcgcgttatccgtaccgtggtccgcgccggatttacccagatcacccagctgcagtgatgccataaagtctttcagtaacggcactgctgcaaaggagaacaggtaattgccgtattctgcggtatcggagataaccacgttcatttcatacagacgcttacgggcaatggtgttggcaatcagcggcagttcatgcagtgattcataataggcagattccgcaatgatccccgcgtcaatcatggtttcaaatgccagctcaacaccggctttcaccattgcgaccatgacaacaccgtggtcaaaatattcctgctcactgattttctgctcagaatccggatagttttcaaatgccgtcttgccagtctcttcacgccaggtcagcagatttttatcatcattcgcccagtccgccatcatcgttgaggagaaatggccggaaatgatgtcatccatatgtttttcaaacagagtcttcatctgtgctttcagggtttcagacagctgataagcacggacttttgccgggttggacaatctgtccatcatcagtgtgattccgccctgtttcagcgcttctgtaatggtttcccagccgtactggatcagcttacctgcatacgcaggatccgcgccgtcagcaaccattttgtcataacagagcagagaaccggcctgcagcataccgcagaggatagtctgctcgcccatcaggtcagatttaacttctgcaacaaaggatgattccagaacacccgcacggtgaccgccggttgccgcagcccaggctttggcaatcgccagaccttcacctttggcatcattttccggatggactgcaatcagtgtcggaacaccaaagccacgcttgtactcttcacgcacttctgtacccgggcatttcggtgccaccatcacaaccgtgatatcagggcggatggtttcgccgacttcaacaatattgaagccgtgtgagtaacccagcgctgcgccggatttcatcagcggctgaaccgccttaaccaccgcagaatgctgtttgtcaggtgtcaggttaaccaccaggtcagcctgcgggatcagttcttcatacgtgccgacggtaaaaccgttttcggtggcgcggcgccatgaggtgcgcttctcatcgatcgcttcctgacgtagtgcataggcgatatccagcccggaatcgcgcatgttcagtccttggttcagcccctgtgcaccacagccgacaatcaccacttttttgcctttgagatacccagcctcgtccgcaaattcttcgcgtgccataaaccggcatttgcctaactgcgccagctgctggcgcaaattcagtgtattaaaataattcgccatggtgactccgtgtattgtgtttgctcagattgctgtcttcgcagcactgatttcgttatttaccggggtgatataccctttatttataatgactatatgtcatgattttcattgcttaaattgatatattcacaagatagtgatgcaatttatgcaacatactgactaaaacataatcccctgagaggttgtgatggatatccgggaactcagactgtttttacatcttgcggagagctgccatttcggcaaaaccgcggctgccatgtatatcagcccgtcgacactctcacggcagatccagcggctggaagaatctctcgggcatcagctgtttctgcgggataaccgcactgttcagctgacagccgccggtgaacagctgaaaaaatttgcgcaggaaaccgtgctgcaataccagcagctgcaacatgcgcttaatcatcagagcccgtcactgaccggtgaattacgtctgttttgttccgtcactgccgcatacagccatctgccgcagatcctcgatcagttccgggcagaacatccgcaggtggaaatcaagctgaccaccggggatgcggcggatgcagtggaaaaagtgcagtcacaggaagcggatctcggtatcgccggaaaaccggaaaaactgccggaaaatgtccgctttcaccagataggcgaaatcccgctgtcactgatagcgcccgcgctgccgtgccaagtcagacagcaggcggtacagccggtgcccgactgggaaaatatcccgtttatcattccggagcatggcccgtcacgtaaacggattgatttatggtttaaaacacaccggattcaggatccgcagatttatgccacggtgtccggccatgaagcaattgtatcgatggtggcactgggctgtggtatcgcgctgatcccgaatgtggtggtggagaacagcccggacgcaatccgcagccggatcctgcaactcgataatatttcgatggtcgcgccgttcgagctgggtgtctgcacgctgaacaagcggctgcatgagccgcttattcgtgctttctggcaattactgccgcgccaccccggataactgcggggccaggaaacgggcaaatgcggtattgccggtttcatcacggaaatcgtagccaagtgcattcaggtgctgctcaaactgcacatccccttcctgaatttcaaaggccgccagcacgcgcccataatccgtgccgtgactgcggtaatggaacagggtgatattccagtgtgtaccgagtgtttccaggaatttcagcagcgccccgggcgcttccgggaattcaaaactgaacagccgctcctgcaacggtgctgacggacggccacccaccatgtagcggacatgcagcttcgccatttcgtcatccgacaaatctgtcgcactgaacccggcggcggaaaggccatccagaatcgtctgccgcgcgcccggaccttcatctgcacggacgctgacaaacactgatgcttcatctgaaccgctgtagcggtaattaaattccgtcaccacacgcgggccgagcgcctgacagaaacgcaaaaagctgcctttctcttccgggatcgtcaccgcgaacacgccttcacgctgttctcccagctcacaccgctctgacacataacgaagcacatggaaattcacattggcaccggaaagcacatgcgccagattttccccccggatattgtgctgctgaatgtattttttcattcctgccagcgccagcgcccctgaaggttccgccactgcccgcacatcatcaaacagatctttcatagctgcgcagatggcgtcactgtccaccgtgatcacatcatccagatactgctgacacaaacggaaggtctcatcaccaatccgtttcaccgccacaccctcggcaaacagcccgactttcggtaattcgaccggatgcccggcatccagcgccgctttcagacaggccgcctcttctgcctcgacaccaatcactttaatgtccggcatcaggtgtttaataaacaccgccaccccggcggccagtccgccaccgccgaccggtacaaagactctgtcgagcctggcattctgctgtaacagttcaagagcgatagtggcctgaccggcgatcaccgacgggtgatcgaacggcggaataaacgtcatcccgagggatgcggccagctccagtgcatgtgcttttgcttcatcaaaattagcgccgtggagaaccacttcgccgccgaacccgcgaaccgcatccactttgatatccgccgtcgccaccggcatcacaatcagggctttcaccccggttttcccggcagataacgccacgccctgagcatggtttccggctgatgccgtcgctacgccccgccgtttctgttcttctgtcagctccgcaatcatggcatacgcgccgcgcagcttaaaactgtgcacgggctgcctgtcttcccgcttcactgaaatggtattgccgagccgtgccgacagcttcggcatcagttgcagcggcgtgacctgagcgacatcataaacggaggcactgaaggccgctctcacatactcagccgctgacggctgagcagacaatggttgttttgcggtcatccctaacccccgagtttacttttatcccgtaccgcgcctttatcagcactggtcgccagcagtgcatatgcacgcaacgcaaaagagacctgacgttcacggttctgcggtgaccaggctttttcacctcgtgcctcttccgctgtgcggcgggctgccagagtttgctcatccactttcagtgaaatctgccgtgacggaatatcgatggcaataatgtccccggtctgaaccagcccgatcagcccgccgttggccgcttccggcgaaacgtggccgatggataacccggaagtgccgccggagaaacgaccgtcagtgataagcgcacagctttttcccaggcccattgatttcaggtaggtggtcggatacagcatctcctgcatacccggcccgcctttcggcccttcgtagcggatcaccaccacatccccggcaacaacttctccgccgagaatcgcttttaccgcatcatcctgactttcatacacttttgccggtccggtaaaggttaagctgccctcatccaccccggcagttttcacaatgcagccatcttcggcaatattgcctgacagtaccgccagcccgccatcctggctgtaggcatgggttttgctgcggatacagccgtttttgcggtcatcatccagggacggccagcggcagtcctgtgagaatgcttttgttgtgcggattccggcaggaccggcggaatacatccgtttcaccgcatcatctttcgtcagtgtaatatcatacgccgccagtaactccggcagggtcattcccagcacgttactgacttcccggtgcagtaacccggcgcgatccagctcgcccaggataccaattaccccgccggcgcgatgtacatcttccatatggtatttctgcgtgctcggcgcgactttgcataaatgcggcaccgcacgggagagacgatcaatatccgtcattgtgaaatcaacttccccttcctgtgccgccgccagcagatgcagaactgtgttggttgaaccgcccatggcgatatccagggtcatcgcattctcaaacgctgctttggtggcgatattgcgcggcagaaaacggatatcatcctgctcgtaatattttttggtgatttccacaatccggcgtccggcattaaggaacagatttttgcggtcagcatgagttgccagcagcgagccgttccccggctgagataagcccagcgcttcggtcaggcagttcatcgagttcgcggtaaacataccggagcaggagccgcaggtcgggcaggccgatcgttcgatttgttcactgtccgcatcggaaacatcaggatttgcaccctggatcatggcatccaccagatccagcttgattatctgatcagacagtttggttttaccggcttccatcgggccaccggatacaaaaataaccgggatattcaggcgcagtgaggccatcagcattcccggagtaattttgtcgcagttggagatacaaaccatggcatccgcacagtgtgcattcaccatgtattccacagaatcggcaatgagttcgcgtgacggcagagaataaagcatcccgccgtgccccatggcgatcccgtcatccacagcaatggtattgaattctttggccacgccaccggcggcctcaatttcctctgccaccagtttacccagatcccgcaggtgaacatgacccggaacaaattgtgtgaatgagttaacaaccgcgataatcggtttgccgaaatcggcatctgtcattcctgtcgcacgccataatgcgcgcgcacccgccatattgcggccatgcgttgttgtcgccgaacggtactgaggcattgtaatctcccgtgtttgcaaaaatcaggcgggggaacgacccgcctgcaaatctgtttcgttattatggatttaccggatctaaccagccccatttgtcttctgttttcccggtgaacaggccaaagaatgcctgctggatctctttggtaaccggtccgcagcggccgatacccacctgaataccgtcaacactgcgtaccggcgtaacttccgccgcagtaccggtcataaagacttcatccgccagatagagtgattcgcgggatagcgtctgctcacggatttcataacccagctcttttgccagggtcagaatcgcatcacgggtaatacccggcagtgcggaagaggtaaatggcggagtgaagataatgttatttttcacttcaaacaggttttcacccgccccttcagagatataaccgttcacatccagcgcaatcccttcctgataaccgtgacggcgggcttcactgccgaccagtaacgaggacaggtagttaccgcctgctttggccgctgtcggaatggtgttaggggctgcgcggttccaggatgacaccatcgcgtcaatccctgcatccagcgcttcctcacccaggtaagcaccccacgggaatgccgcgatgatgacatcggttttatagccctgcggcgggttaacacccataccgacatcaccgataaagaccagcggacggatataaccactggataaattatttttgcgcagcgtggcgcggcaggcttccattaattcatcaactgaatattctaccggcatacgatatattttggcggagtcatgcaggcgctgcatatgttcgcgatgacggaaaacgacagggcccttatgagactcataacagcggatcccttcaaaaacagatgtcccgtagtgcatggcatgacacataacatgcacttttgcttctgcccacggaaccatctcatcattgaaccaaataaaatcagctttttttgtcattgtaattttcctttatactgcacagctaatatgttgataattttgtgtattttttgtgagaacttcgacatccgccacatccgccagcttaactaactgtgtacagagcagggccggcggccgcaggcttgaaactgttaactcaatgtttacattatcaccttcggaacctttcgccagatccattttcatggcacagacgttaaatccgcggtggcgcacaacacgcagaacccgttccaggatttccgggcatgaacgtgcctgaattgctaactgatgctgcatcataatgagctctccaacatatgttcgttacccgctcccggcggtactaatggccagacgttatcttcttcacggatggcgacatgtaataaatacgggccctgatggtgtaacagggtattaatcgcagacggcagcgctgatttttcagtcaccagctgtcccgggatatcaaacgagcgcgccagggcaacaaaatcaggattgtcatccagtaccgtctcgctgtaacgcttatcaaaaaacagttcctgccactgacgcaccatgccgagacgctgattatccagcagcaggattttgaccggcagacgtttgcgtttgatagtggtcagttcctgcacattcatcatgaaagagccgtcaccggaaacacacagcacggttgcttccgggcgggcaatctgtgccccgatcgctgccggtaaaccaaaccccatcgtccccagaccaccggatgtcagaaaattctccgggccgtcaaaggtcatatgctgtgccgtccacatctggtgctgcccgacatccgttgtcaccacacaatctgccggtttggccgcagatacctgagataacagcagcggtgcataaatactgtcaccggcatgtgaataatcaggcgcgtgctctgctttcagtttcttcacgtgatgcagccaggcggggaatgacagcggctgtgacagcagcggcagagcctgtttcgcatcacaggcaagagaaacatgtgtctgccgtaatttatccagctcggccgggtcgatatccacatggatcacctttgcatgcggggcaaatgcgttcagcttgccggttacccggtcatcaaaacgggctccgaccgcaatcagcagatccgcctcctgaactgcaaagttcgctgcttttgccccgtgcatcccgagcataccgaggtaatacggataatccggagagaccgcccccagccctttcagggtactcaccgccggcatcccggtttcatccagaaacgcccgcagctgtgcaacggcacctgacattccgacaccaccaccggcatacagcaccggcttccggctttcccgcatcagttgccgggcacgggagagagccgtctgcgacagaggttctgcattatttaccggcagaaaatacggggtaaattcactaatctgtaattgaatgtctttcgggatatcaatgagtaccggccccggacgcccgcctgcagcaatcgcgaaagcctcggtaataattcgcggcaaatcagtaattgattcaaccaggaagctgtgttttgtgcatgacaaagacagccccagcacatcgatctcctgaaaggcatccgtaccaatcagtgatgaacctacttgtccggtgatggcaacaacaggtactgaatcaagcagtgcatccgccagcccggtgataaggtttgttgctcccggccctgatgttgcgatacatacacccgttctctgccctgcccgtgcatagccgattgccgccataaccgccccctgttcatgacggcagagcacatgctccacaccaccgtcatacagcgcgtcatagaccggcatgatcgccccgcccgggtagccgaacacagtgtcaacgccctgtgttcgtagtgcctgcactaaccactgtgccccgttcatgtgtgactccttagtccgccgttttcttttcagtgaaaaatcataaatttaaggttaaaaaaaaccccgcgcctttcggtgcggggttctcgtgagatcctggctcgtatcagccattttcgtatccgagtgcagccccgcacggtgggataataatcaccaccacgctcacgataattaggctaatcactcggacaatcttattcatggataaattcttctgtctgccgtattcagttggtctctttattttagagttatcatgttatcgaattcctgacaacggctatttgtcttttttttaacaacaagaataaaaatccataaaattcagtgaactaccattattaacgatatgtttcactgctatttttttatccggcggtatcctcctctgccaaaatcgttacttccggaacaacaccgaaaaaacggggcattctccggtacaacttacttttcctctgaacactattcccgggagcacaatggaaagcgtggcagattttttattctgaaacccggaaattaattccccgccgcccggtttttccatgcaacacgcagaacagaaatcacttttatgcaacatacataaaatctgtcgatatacatcgtaaaaaacggaattttgctgcgaaatgatggaaaaaatcaccatcatgataattcgtttatgtaactgcaggatgacctgatgtcatttgctattgtttatacccgtgccatgatcgggacagaagcaccgctggtcaccgtcgaggcacatatcagcgccgggttgcccggattaacactggtgggattaccggaaaccgctgttaaagagtcgagagacagggtccgcagtgccctgatcaacggcggatttgaatttccggcaaagcgggtcactatcaatcttgccccggcggatttgcccaaagaaggcgggagatatgacttacctatcgctgttgccatactctcagcttcagagcaaatagacgcaaaattagcagagaattatgaattttcgggggaattaggcctttcaggagaactccggttctgccgcggcatattaccggcagtactggccgcccgtcagtcaggaaggcaggctgtggtatcaaaacagcataatgatgaattatgtattctgcctgccggttcggcgctgatggcggataatttactgcaggttgctgctttttttcatcagcagcaggaactgaatgaaaacagccacctggcgggaaaaacagaaaatgataacggtacaagtattgatgatattaccggccagaaacacgccaaacgggttctggaaataagtgcagccggcgggcacaatttgctcctgctcggcccgcccggtaccggaaaaaccatgctggccagccggctgggaacactgctcccgccgttaaccgcgcaggaagctcttgacgtggcgataatccggagcctgacccaaacctcatcagaacaaaataaatggccccagcgtccgttcagggcaccacatcataccgcatcctctgcggcactcaccggtggcggcagtattccgctgccgggagaaatatcgctggcacatcacggcatcctttttcttgatgaactccctgaattctcccgtaaatcactggattctctgcgtgaaccgcttgaatccggagaaatcattatttccagagctaaagcaaaagtgtgttttcctgcccgtatacagcttattgctgcgatgaatcccagcccgacaggccactatcagggcatacataaccgcagcggccctcagcagcttctgcgttatctttcccgcatctccggaccgtttctggaccggtttgatttatcaattgaagtaccgatgctgccaccaggaacattgagccggacagaaaaagatctgccggttcatgagcagataaaagcacgggtacagtccgcacgacaacaacaataccgccgtaacgggcagggaaaactgaatgcgggactgtcaggcaaagaaacagaggaggtgtgtgcactatcagcacaggatgcccgttttcttgaggatgcactgacgcaacttaatctgtctgtgcgggcatggcaccgtatactgcgcgtcagcagaactattgccgatctgcgggatgaaggaggacaggtatcacgaaaagatatactggaagcactcagttaccgggtaatggacagattaatccataaactgcagcaggcggtctcttaaaaaaagaaaggggcacgaatgccccttttaacttattatttctgatgatattaatcatctgtgtcggtatagtcttccgacggatcgatctgaggtttaccaccggacagcgtgtggaagcgttttggtttgcgaatacgctccagatacttaatccacactttttcttctgctgtttccggcatacgctcaccacggcatacagaaacaaactgtttttcttcgtccgtctggggggcgcgtttacccatatccagttcgttgaaagcaaaaccatggcgctcaagtaactgagcttcttttatggtgaaatgaccatggcgtgaaaaaccacgaggataatgtttattatcaaaaaaacgattagtcgtgataaagctttctgccatctgacacactcctaattctctactgacatactctttatggcgcggagtattagatagcattaggattctgtaaaacaaaatatttaaatcataacgacaaaaatttttggagataccagtggatacagaattactgaaaacctttctggaggtcagtaaaacccgtcacttcgggcgtgcggctgaatccttataccttacacaatctgcagtcagctttaggatcaggcagttagagacaaatctcggggcaaatctttttacccgccaccggaataatatccgcctgacagccgccggcgagcggttagtaccttatgccgaagcgctgatcaatacctggcaactggcaaaacaggaaattaatcatgcctctgtacacaacccgctttccatcggagcgactgcatcattgtgggaagcttatctgaccccctggctcggacagatctaccaatcacatgcagatctgcgcctggagaccagaatcgcatcccgccagtctctggtaaaacaattacatgcacgggagctggatttactgatctctactgaacaaccaaaaatggatgaactgaaaagtgagattgtcggagaaatcacacttcagctgttcagcatacaaccgctgtcggcagaaaatcctccgggccttatccgcctggaatggagtgcagattttcagcagcatgatgaggctgttttcacccgctgccagtctccggttctgacaacatcgtctgcttttcaggcaaaacaattactgtcagtgacatcatctgtcacttatttaccggcacactggaaaaaaatatatcccgaactgaaccccgtggataatgacctgattacaaagcctctgtacgctgtctggctacagaacagtgatcagcagggacttatcggccaattaatcgcaataccggtataacgccggttactgatgattttaaagatagatagtgcggtaagtaactgttgcattgaaaggagtggttgcaaaaaagaaaggaaattcggcaggatacgatacataagaaggcgaaattcagataataaaaaacccagttcataacgaaccgggctattaataaataaagatctttagttattacttatcaagtaaatggcaggggcggagaggctcgaactcccaacacccggttttggagaccggtgctctaccaattgaactacgcccctaaatgttggcggaacggacgggactcgaacccgcgaccccctgcgtgacaggcaggtattctaaccaactgaactaccgctccgcgtatctctgtgtgactgatgcaaaggtgtgctctaccaactgagccatatcagcacgctaaatttgatgcctggcagttccctactctcgcatggggagaccccacactaccatcggcgctacggcgtttcacttctgagttcggcatggggtcaggtgggaccaccgcgctacggccgccaggcaaattctgttttatcagaccgcttctgcgttctgatttaatctgtatcaggctgaaaatcttctctcatccgccaaaacagcttcggcgttgtaaggttaagcctcacggttcattagtaccggttagctcaacgcatcgctgcgcttacacacccggcctatcaacgtcgtcgtcttcaacgttccttcaggacccttaaagggtcagggagaactcatctcggggcaagtttcgtgcttagatgctttcagcacttatctcttccgcatttagctaccgggcagtgccattggcatgacaacccgaacaccagtgatgcgtccactccggtcctctcgtactaggagcagcccccctcagttctccagcgcccacggcagatagggaccgaactgtctcacgacgttctaaacccagctcgcgtaccactttaaatggcgaacagccatacccttgggacctacttcagccccaggatgtgatgagccgacatcgaggtgccaaacaccgccgtcgatatgaactcttgggcggtatcagcctgttatccccggagtaccttttatccgttgagcgatggcccttccattcagaaccaccggatcactaagacctactttcgtacctgctcgagccgtcactctcgcagtcaagctggcttatgcctttgcactaaccgcatgatgtccgaccatgcttagccaaccttcgtgctcctccgttactctttgggaggagaccgccccagtcaaactacccaccagacacggtccccgatccagattatggacccgggttagaacatcaaacgttaaagggtggtatttcaaggatggctccgtgcagactggcgtccacacttcgttgcctcccacctatcctacacatcaaggctcaatgttcagtgtcaagctatagtaaaggttcacggggtctttccgtcttgccgcgggtacactgcatcttcacagcgagttcaatttcactgagtctcgggtggagacagcctggccatcattacgccattcgtgcaggtcggaacttacccgacaaggaatttcgctaccttaggaccgttatagttacggccgccgtttaccggggcttcgatcagaagcttcgccttgcggctgacctcatcaattaaccttccggcaccgggcaggcgtcacaccgtatacgtccactttcgtgtttgcacagtgctgtgtttttaataaacagttgcagccagctggtatctgcggctggcttcagctccgtgggtaaaccacttcacctaatgccagcgtgccttctcccgaagttacggcaccattttgcctagttccttcacccgagttctctcaagcgcctgagtattctctacctgaccacctgtgtcggtttggggtacgattaatggtaacctggagcttagaggcttttcccggaagcagagcatcaatcacttcaccaccgtagtggctcgtcgtcacgcctcagtgttaacaaccgaccggatttgcctggtcagtccacctgcacgcttaaaccgggacaaccgtcgcccggatgatttagctttctccgtccccccttcgcagttaccaccagtacgggaatattaacccgttgcccatcgactacgcttttcagcctcgccttaggggtcgactcaccctgccccgattaacgttggacaggaacccttggtcttccggcgtgcgggtttttcacccgcattatcgttacttatgtcagcattcgcacttctgatacctccagcatgcctcacagcacaccttcacaggcttacagaacgctcccctacccaacaatatttacatatcgctgccgcggcttcggtgcataatttagccccgttacatcttccgcgcaggccgactcgaccagtgagctattacgctttctttaaatgatggctgcttctaagccaacatcctggctgtctgagccttcccacttcgtttcccacttaattatgactttgggaccttagccggcggtctgggttgtttccctcttcacgacgaacgttagcacccgccgtgtgtctcccgtgataacattctccggtattcgcagtttgcatcgggttggtaagtcgggatgaccccctagccgaaacagtgctctacccccggagatgaattcacgaggcgctacctaaatagctttcggggagaaccagctatctcccggtttgattggcctttcacccccagccacaagtcatccgctaatttttcaacattagtcggttcggtcctccagttagtgttacccaaccttcaacctgcccatggctagatcaccgggtttcgggtctataccctgcaactaattcgcccagttaagactcggtttccctgcggctcccctattcggttaaccttgctacagaatataagtcgctgacccattatacaaaaggtacgcagtcacaccccgaagggtgctcccactgcttgtacgtacacggtttcaggttctttttcactcccctcgccggggttcttttcgcctttccctcacggtactggttcactatcggtcagtcaggagtatttagccttggaggatggtccccccgtattcagacaggataacacgtgtcccgccttactcatcggactcacaacaccagtgctttcagatacagggctatcacctgctgtggccagcctttccagactgttctcttaacactgatgctgattaaggtcctgggctgctccccgttcgctcgccgctactgggggaatctcgtttgatttcttttcctcggggtacttagatgtttcagttctcccggttcgcttcattaccctatgtattcaggtaatgatagtgcaacgaattgcactgggtttccccattcggaaatcgccggttataacggttcatatcaccttaccggcgcttatcgcagattagcacgtccttcatcgcctctgactgcctaggcatccaccgtgtacgcttattcgcttaacctcacaacccgaaggtgtcttaatgcgacggactgcgctttgtgatttctttgtcgggcggtgctcgtgatgctcacatacctgagtatgctgcgctcactgcgctccggccttcgcgaaatcacttcgctcgccgcgtcttacactgaagaacacgttcaaagttgttcggctgagagactcatcaatattacctcggtgataatattgattgtttcaatttttcagcttgttccggattgttaaagagcataattgttaagctgactcttgaatcagcttaatcattatttgcagataactttcactcatccgcgcagactggcgtcccctaggggattcgaacccctgttaccgccgtgaaagggcggtgtcctgggcctctagacgaaggggacattagtcagcttcgcagacgctctctgctcattttctatcagacaatctgtgtgaacactcacaattcaaatcaacataggtaaggaggtgatccaaccgcaggttcccctacggttaccttgttacgacttcaccccagtcatgaatcacaaagtggtaagcgccctcccggaggttaagctacctacttcttttgcaacccactcccatggtgtgacgggcggtgtgtacaaggcccgggaacgtattcaccgtagcattctgatctacgattactagcgattccgacttcatggagtcgagttgcagactccaatccggactacgacgtactttatgagttccgcttgccctcgcggggtcgcttccctttgtatacgccattgtagcacgtgtgtagccctactcgtaagggccatgatgacttgacgtcatccccaccttcctccggtttatcaccggcagtctcctttgagttcccgccatcacgcgctggcaacaaaggataagggttgcgctcgttgcgggacttaacccaacatttcacaacacgagctgacgacagccatgcagcacctgtctcagagttcccgaaggcaccaaagcatctctgctaagttctctggatgtcaagagtaggtaaggttcttcgcgttgcatcgaattaaaccacatgctccaccgcttgtgcgggcccccgtcaattcatttgagttttaaccttgcggccgtactccccaggcggtcgacttaacgcgttagctccggaagccacgcctcaagggcacaacctccaagtcgacatcgtttacagcgtggactaccagggtatctaatcctgtttgctccccacgctttcgcacctgagcgtcagtctttgtccagggggccgccttcgccaccggtattcctccacatctctacgcatttcaccgctacacatggaattctacccccctctacaagactctagctgaccagtatcagatgcaattcccgggttaagcccggggatttcacatctgactcaatcaaccgcctgcgtgcgctttacgcccagtaattccgattaacgcttgcaccctccgtattaccgcggctgctggcacggagttagccggtgcttcttctgtcggtaacgtcaattgccaaggttattaaccttgacaccttcctcccgactgaaagtactttacaacccgaaggccttcttcatacacgcggcatggctgcatcaggcttgcgcccattgtgcaatattccccactgctgcctcccgtaggagtctgggccgtgtctcagtcccagtgtggctgatcatcctctcagaccagctagggatcgtcgcctaggtaagccgttacctcacctactagctaatcccatatgggttcatctgatggcgcgaggcccggaggtcccccgctttggtccgaagacattatgcggtattagctaccgtttccagtagttatcccccgccatcaggcagatccccatacattactcacccgtccgccgctcgtcagcagagaagcaagcttctccctgttaccgcccgacttgcatgtgttaggcctgccgccagcgttcaatctgagccatgatcaaactcttcaattaaaagtgtctgatgctcaaagaattaaactgtttactgctgcttattactaagctgctgtattggtcactcttcaagacttctcaaaaataatattttttgtgatatgtcctgcgagtgcccacacagattgtctgataaattgttaaagagcagttgcaacattcgctgccgttgccggtcttctgcgttgttgcgaggctgcgtatattacgtttccagcccctttgagtcaagcgttgtttttcaactttccgctttttctctttctgccggaaccgcgtgttatcgcgttgttccgtgtcagtggtggcgcattatagggagcttttcgttttgcacaaccttttttttgaattttcttattaactgtctgtcttttgagcatcatgtcttattttccggcaattatgcccgaaagttgcattgcctccggtaaactctctcattaagatcaccaaaatacatttatattctgaggtaattattgtgaataaactccgtccctatctgacattaaccccttctgtcggtaaaaatgtcatgatcgatgactcctccgtcattatcggtgatgtgcgtctggctgatgatgtcggtatctggccgctggttgttgcccggggagatgtcaattacattcagattggtcagcgtaccaatattcaggacggctccgtattacatgtcactcaccagacggcagataacccggccggtcacccgctgattatcggtgaggatgttaccgtcggccataaagtgatgctgcacggctgcactatcggtaaccgtgtcctggtcggtatgggttcaatcctgctggacggagtggtggtagaggatgatgtaattatcggcgcgggcagtctggtctctcccggcaaacgtctggaaagcggctacctgtatctcggcagccctgccaaagccgtccgtccgctgaaaccggaagaatatgaagggctgaaatattcagccaataactatgttatgtggaaaaataattatctgtcacagggcaaccggtaaggcggctcatccgtctcacctttttcaatgaattccgcaaactcttcctccagatcccagcggttccggcggaagagaaccagcatatcctccccgggagccgttccgtaacgggattgcaggtattgtgcagagacgcggcaatctgataaaaagccgttgatcatcaccggaaaaacaatgcactcccgatcatcatcccgtgattcgcggtccggaaactgaatggactggttcatgatgtcatcttctgtttgagttttgtcagtaccggtgcaatatccggcaatacaccatgccataacctgaatgcaaaagccgcctgaccagccagcatacccagcccgtcagcataccgggttacaccgttatctgcggcaagctgcagaaaaggtgtcagccccgtacggtaaaacatatcgtaacaggcaacagacggattcagtaatgactgagggatttgcggaaccacgccgtccaccccggatgatgtggcattaataatcagtgaaaatccggtcgttccggtttcactgacaggcattgcactgacttttccgtgaccggcaaaccgctcagccagagactgcgctttgctgaatgtccggttagtaacggtaacagcgcaacctgccagcaacagagacagcaacacgccgcgggctgcgccacctgcaccaatcagcagaatactgtcgccggggcggataaacatcagccgctgcaaatcaattaccagcccttcaccgtcggtattatcccctgccagccgtttatcttctgtcagatacagggtgtttaccgcaccgcagacctgtgcccgttcactcagctcatccgccagcgcatgtgcctgctctttaaaaggcagtgtgacattcgcccccagcccgcctgcagcaaaaaatgcagaaacgctgtcgcggaagccgtcgagcggagagaggatccgttcataactcagctcaataccaaactgtccggcaaattcctgatgaataaaaggtgactgactgtgtgcaatcggatggccaaaaacggcaaattttttcattccgggtccttttggtgttctgtcagccctggcggtataactgccctgtcagtgcatcacggatctcagacggatttttccgcccgccgaccagcccgtcaaccaccgggatccgtccgttaaactgtgcatttacttcatcagttgtccggcacggctccagcccgctcaggttcgcactggtggagaccaccggtttgccgtacgactgacataatgctttgaccaccggatgatctgtcacgcggacagccagcgagtcaaaacggccggtcagccattttggtgtggcgggttttgccgggatcacccaggtcaccgggcccggccaggaggcaaacatcgcttcacgctgctcatctgtcagccgtgagtcatcaatataaggttttacctgatcatagttatctgcgatcagaatcagtcctttttcccacgggcgctgtttcagatccagcagcgccatcacggcctgctcactgtcaggatcacaacccaggccaaaaacagcctctgtcggatatgcgataacttcgtggttattcagggcttttataattgtgtcgaaatttgctgtggtttgattatgattcatcattattctcattttgttctttttgtcgttttgcgcaggctttactcgcacaacttaatcttacgcctgttgatgtccttttttccaccagcagcggataaccacaatactgacactcaccggcaaccggtttgctgttcagtgaaaactggcaggcaggatagcggttacaggcataaaaaactttaccgaaccgtgacttacgctgaagtaacttaccatcatggcactgcggacaggccaccgtcgtttcatctggtgaatcaatagatgcaatatattcacattccggaaaatttccgcagccgataaacatcccgtagcgcccctggcgcagcaccagcgtcccgccgcactgcgggcacaactgtccgtccagcactttgatgagatgcccgtcagtaccggctttcagtggacggatgtaatcacattccggataagcagaacagccgaaaaaaggcccgtgggcaccattacggataaccagctctccgccgcattccggacagcattccgccgttgattttgacatgataattttaccttacgccgataccgttcagtgatgcaggcggatatatcccccgctgaccacggctattttacctgataactccagctgcagcagttgtgttgtcacctctgtgaccggcagctcacaccgagcggcaatgatatctgccggtgtcggttcatcatccacattaatcagcacatgtgcaaacggcagttcctcctgtaccggtgtgataatcacttccggtgcttccgtgaccggcggcagcgccagccactgcatatccagcgcgagatgatccgtgatatcagccggtgctgtcgcaatataggcgccctgctgcaacaaccagtgattaccctcatacgccggattaccaagcaccgccggtaacgtaaatacatcccgcccctgttccagtgcgcattgtgccgtaattaatgacccgctgcgccgtccggcctcaatcacaatcagcagacggcttaacccgctgattatccggttacggcggggaaagtttttggccagcggcggtacatccggaaaatattcagagataagtgcgccattttctgtaatctcctctgccagcgaccggtgttttgcgggataaatatgagacagcccgctgccggataccgcaaccgtctttccgcctgatgccagcgccgccttatggcagcatccgtccacgcccgcagccaggccgctggttatcaccagattgtgctgcacaagatgccgggtaaaacagtccccccacttttcgccgtaatgggtaaccgcgcggctgcccaccatactgacctgcggggcagataacacctcatactgccctgccacaaaaagcacaagcggaggtgaatagatctgctttaataaaaacggatagtgtggtgatgacaggggtaatatcatgttacccggtgaatcagcccatataagtgccgttttcagcctggatgtattcacattcatgaattgctgacactgtaccagtgtaagtccgcactgatgtaactggcggcggatctcaccgtttttctgtgtgcaggtctctgtcagtattgtcgcagcactgacagcatgatgtgcacttaaccgcctgatacacgccagacgtaaccaaatttccctttcatccattgcgccatcctgactgagcctgtgataaaaatgcggtgtccgctgcgggcaatactgtcaatcaggctgataactgtctagaatagacattaatttccatccattttttagatagaacacgaaaaaatctatggcgttattaactgtattacattatcccgacgagcggcttcgcaagattgcaaagccggttgaaaaagtcgatgccggcattcagaagattgtcgatgatatgttcgaaaccatgtacgacgaagaaggtattggtctggcagccactcaggttgatatccaccagcgcattatcgtgattgatgtgtcagaagagcggaatgagcgcctggtgctgatcaacccggaactgctggaaaaatccggagaagccggaatcgaagaaggttgtttatcgattcctgagcagcgggcattcgtaccgcgtgctgagcacgttaaaatccgggcgctggactataacggcgagcctttcgagctggaaaccggcgatctgctggcaatttgtatccagcatgaaatggatcacctggaaggtaaattatttgtcgattacctttccgctatgaagcgccagcgcatccgtcagaaagtcgaaaaactggacagactcagagcccggtcttaatacccgcagtctttatctgccacagaccgcagcagcgcacgggcactgttattgtttatggcattattatttttacaggaaagcaacgtgtcagattcattacgtattatctttgcaggaacgcctgattttgccgcacgtcacctcgatgccctgattcagtcagagcacaatgtcgttggcgtcttaaccatgccggatcgccctgccggccgcgggaaaaaaatcaccgcgggcccggtaaaagaactggcacagcagcacgatattcctgttttccagccatccacgctgcgcaaagaagaaaatcaccagtggatacgtgaccagcaggcggacattatgattgtcgtagcctacgggatgattttgccgcaggcagtgctggatattccgcgtcttggatgcctgaatgttcacggttccctgttaccggcatggcgtggtgcggcgcctatccagcgtgcattgtgggccggtgataccaaaaccggggtcaccatcatgcagatggatgccggcctggataccggcgatatgctgtataaagctgagtgtgatatcacatcagaagataccagtgcatccctgtatgaaaaactcgccggtatcggcccgcaggcactgttacagacactgtctctggtgtgtcagaatgcactccgccctgaaaaacaggatgacaccctggttacctatgcagaaaaactgagcaaagaagaagcccggctggactggtctctttctgccgcacagttagaccgctgtatacgtgccttcaatccgtggccaatcagttatatggtgattgatgagcagccggtgaaagtctggcaggccaatgcgattgcggaacagacttccgcagcgccgggaacggttatccgtgcggataaaaacggcattcaggttgccactgcagaagggatcctgaatatcacacagttacagcctgccgggaaaaaaccgatgtcagccgctgatattctgaattcccgcaaagaatggtttaccccgggaaattcactgtaattttgtttcataaccggcattccccgcgtggtatgccggtccccctttctctttatcgcttgccggcataccggaatcacaatgaaaaacagctataacttacgcagcattgctgcccgtatcatcagccaggtcctggatcagggacagtcactcagcgcacttctgcctgaatatcagcgggatatcaacccgaaagataaagcattactgcaggaattatgttttggtgtgatgcgggtgctgccggagcttgaatggtacagccagcagctgatggcaaaaccgctgaccggtaagcagcgggtactgcattatctgattctggtcggtttttatcagctccgttatacacggatcccggcacacgcagcactatccgaaacggttgacggtgctgtggcactgaaaaaaccacagctgaaaggactgattaacggcgtgctgcgtcagttccagcgtcaggagcaggtgttgtccgagcgttttgctaataatgaaagccgctggctgcatccgaaatggctgctgtcgcggattcaggcggcatatcctgacaactgggaagctgttattacggcaaataatgaaaaaccgccgatgtggctacgggttaaccgtaaccatcattccgctcaggaatatcaggcgctgctgacagagaaggatattgaagccttttataatccggcatatccggatgcactgcgtctggcagttccctgcccagtcactgatctgcccgggtttgctgatggctgggtcaccgtgcaggacagctccgctcagggctgtgcattactacttgatccgcagaatgatgagactattttagatttgtgcgcggcacccggcgggaagaccacccacattttagagatagcgccccgcgctcatgtcatggctgttgatgtggataaacagcgtttaacccgggttaatgagaatttacaacgacttaaacaaaacgcggtggtgaaaaccggtgacggccgttatccggaacaatgggcagaatcacagacattcgatcgcattttgctggatgcaccttgctccgcgaccggcgttatccgccgccatccggacattaaatggctgcgccgtgataatgacatcaatgagctggcggcactgcaacgggaaattctggacgctgtctggccttatctcaaacccggcggcacactggtctatgcaacctgttctgtattaccggaagagaatattcatcagataaataatttcctctcttcgcaccgtgatgctgtattaaccgatacaccggcaacaggctaccagatgctgccggatgcgcagagcggagacggatttttttacgctaaactggttaaacaggcactttctgcctgataaacaacccggacgatcatttatatgaaaattattattctcggtgccggtcaggtcggcggcacactggcagaaaacttagtggatgaaaacaacgatattactgttgtggataccaacccggacaggctgcgtcagttacaggataaattcgatctccgggtaataaacggtgccggctctcatccgcgggtactgcgggaagcgggcgcggaagacgcggatatgctcgtcgcagtgaccaactccgatgaaaccaatatgatcgcctgtcaggttgcatacacgctgttcaatacgccaaataagatcgcccgtatccgatcttctgaatatgtccgggaagctgataaattatttttaccggaagcgatcccgatcgatcacctgatcgcccccgagcagttagtgatcgacagtatctataagcttattcagtaccccggtgctctccaggttgtgaattttgccgaagggcgcgtcagtattgtcgccgtgaaagcctattacggcggctcgctggtcggaaacgccctttccagcctgcgcgagcatatgccgcatattgaaacccgggttgtggctatcttccgccaggacagaccgattcgtccgcagggttcaaccatcatcgaagccggtgatgaagtattctttgttgccgcatccgagcatatccgtgcagtaatgagtgaattacagcgtctggaaaaaccgtataagcggatcatgattgtcggcggcgggaacgtcggcgccggtctggcactgcgtatcgagaaagactataacgtcaaactaatcgagcacaacgccaaccgggcaaccgacctcgctgagctgctgcatgacaccattgttttttatggagatgcctctgatcaggaattattagcagaagaacatattgagcaggttgacgtctttattgccctgaccaacgatgacgaagccaatattatgtccgcgatgctcgccaagcgcatgggtgccaagaaagcaatggtgcttatccagcgcagtgcctatgtggatctggtccagggcggcgtgattgatatcgctatctccccgcagcaggccaccatttctgcattactcggccatgtgcgtaaagcagatattgtcagtgtatcgtcattacgacgcggtgttgctgaggcgattgaggctatcgcacatggcgatgaaaatacgtcaaaagttgtcggacgcaaaattgccgatattaagctcccgccgggcactattattggtgcgattgtcagagatgagcaggttattattgcgaatgacgagcacagtattgaacagggagaccatgtcgtgctgttcatcactgacaaacgccacgtacccgaggtggagaagctcttccagccaagtccgttcttcttataaataagtacttaatattttgatagtaaatactattgatttatacttgagaatgacaacttgttaacattttgggtaaggaaaagggtatgagcttcataaaagagtttcgtgaatttgcgatgcgcggcaatgtcgttgatatggctgtcggtatcattatcggtgcggcattcggcaaaattgtgtcctcattagttgctgatgtcatcatgccaccactcggtttactgatcggcgggatcgacttcaaacagtttgccgttgtactgcgggaagccagcggagatgtgcctgctgttgtactgaattatggtgtattcctgcaaaccgtctttgatttcgttatcgttgcgtttgctatcttcattgccatcaaaatgctgaataaattacgccgcgaacaggctgaagcacctgcggagccgccggcaccgtcagcagaagaaacattactgactgaaatccgtgatttattaaaagaacaaaagaaataataaactaaaaggccagtagtaaaagattatctaatcgtttactactggcctcccggtaatctgccttgttgtgtttttctttccggttgtaactccctttacctttcttatttttttctactctctgccggaacaacggatcggatagcagtgcttccagggcgttatcttgtattacgccacgcttgtgagcatattttgtcatagtaacctcattgattatgtttactctctttttgtgaacagccacagggctcagtcgcaccttgttccaggatctccagaatggtgcattgtgaactgacatgtgccgttccgcaacaggcatcactcagcatcttcagagaatcccgcattcgctgcatttcgactaacttcgtttccacatctttcagccgatcatccacaatttgctttgattcacggcaggtgtgatgttcaggatcaacccggatcgataacagttccgtgatcgcttccagtgtaaaccctaattgttttgcataccggataaaacgcagccggtgcagatcctgctcagtatacaaacgatagccgccatccgtccgggtctgatgatccatcatgccctgtttttcataaaaacggatcgtatccggtgtcacttctgcaagttttgctaactgaccaattcggtacatcggcaacctcctgacatcatctggcctgaagccatcatatcagaatagtaaaatgttgtatgtcgttggcagagatatggggctgaggaaagtaacttcaagggcaggattaacagaaataaaaaaaccgggtaaaaacccggtttttttacgcagtaacagattactctgctgctgcttcagtctgggattcagcgcggtcaacaagctcaatgtaagccattggagcattgtcaccagcacggaaaccacatttcagaatgcgggtgtaaccacctgcacgctgagcgaaacgtggtcccagctcgttgaacagttttgccacgatttcgttatcacgagtacgggcgaatgctaaacgacggttagcaacgctatccgttttagccagggtaatcaacggctcaacaacgcgacgcagttcttttgccttaggcaaagtcgtcttgataatttcgtgacgaactaaagaaccggccatgttacgaaacatagcttggcgatggctgctgttgcggttcaattgacgaccactcatacgatggcgcatgaccttatccttctcagtaaaaccttaacctgtgatcttattcgtcagcaatacttgccggcggccaattttccagacgcatgcccagagataagccgcgagatgccagaacgtccttaatttcagtaagagatttcttaccgaggttaggtgttttgagcaactcaacttctgtacgctgtaccagatcaccgatgtagtggattgcttctgccttgagacagttagcagagcggacagtcaattcgagatcgtctactgggcgcagtaaaatcggatcgaattctggtttttcttctttcacttccggctgacgaacatcacgtaagtcaacgaaagcttccagttgttcggccagaatggttgccgcacgacgaattgattcttctggatcaatcgtgccgttggtttccatttcgataaccaatttatccaagtcggtacgctgctcaacacgtgctgcttcaacattgtaagcaatacgctcaactgggctgtagcacgcgtctactaacagacgaccgattgggcgctcatcttcttccgaatgaattcgggcagaagctggaacataaccacgaccacgctgaactttgatgcgcatattaatagatgcgccttcgtcagtgagatggcaaattacatgctccggcttgacgatttcaacatcaccgtcatggatgatgtcggctgcagtcacagggccaatgccagatttattcagagttaagatgacttcatcttttccctgaagttttaccgccagccctttcaggttgagcagaatttccaggatatcttcctgtacaccttctttagtgctgtactcatggagtacaccatcaatctcaacctcagttaccgcacaacccggcatagacgaaagcagaatacggcgcagtgcgttacccagagtatggccaaagccacgctctaatggttcaagggtcaccttggcgtgcgtcgaactgatttgctcgatatcaaccaggcgcggtttaagaaactctgtcacagaaccctgcattgtgtcctctctttggtgctaagccttacttagagtaaagctcgacgatcaggtgctcgttaatatcagcagaaaggtcagtacgctcaggaatacgtttgaacacaccttccattttcgcagcatcaacttccaaccaagttggtttttcacgctgctcagccagctctaaagcagccttaatacgagactgttttttcgctttttcacgaatgctgattacgtcgttaggggaaacctgataagaagcaatgtttacaacacggccatttaccatgacagctttgtggctgacgatctgacgtgcttctgcgcgggtagcgccaaagcccatacgataaataacgttgtctaaacgaccttccagcagagacagcaggttttcacctgtgttgcctttcagacgagttgcttctttatagtagttacggaactgacgttccagcacgccgtacatacgacgaactttttgtttttcacgtaactgaacaccataatcagacagacgcggtttacgggcgccgtgctggcctggtgcttgatctaatttacacttggtgtcaatcgcgcgaacaccagacttcaggaagaggtctgttccttcgcgacggctcagcttgagcttcggacccaaatatctagccattttctttctccaactatcctaaaaaacgtgagggcgattagacgcgacgttttttcggaggacgacaaccgttatgagggatcggagtcacatcagtaatgttagtgatgcggaaaccagccgcgtttaatgcgcgaacggttgactcacggccaggaccaggtcctttaaccataacttccagattcttaataccgtactctttcacagcctctgcgcaacgttctgctgcaacctgtgctgcgaatggagttgatttacgagaaccacggaaaccggaaccaccggcagttgcccaacctaatgcgttaccctgacggtcagtaatggtaacgattgtgttgttgaaagaagcatggatatgagccacaccgtcagagacttgttttcttacacgcttacgtgcacgaacaggtgcttttgccattataagattccccgattatttcttgatcggcttacgcggacccttacgggtacgtgcgttagtcttcgtacgctgaccgcgtaccggaagaccacgacgatggcgtaaaccacgatagcaaccaatgtccataagacgtttgatgctgagggtcacttcacggcgcaggtcaccttctacaacgtatttagcaacttcgtcacgtagttggtcgatttgctcttcagacagctcactgatcttaacatcttcagcaatacccgttgctttacagatagcctgtgaacgggttaagccgatgccgaaaattgcagttaatgcaataacagcatgtttatgatcaggaatgttaatgcctgctatacgggccactatgcactcctaaaaattttggggtaatactgatctgaaaagcccgttttcaggatactcaaacagtagaaccacgtttaataaaaagattggctggctaatttagccagctcaatccaactttgcaagaaaaatatgctttttattagccttgacgctgtttatgcttaggctcagcactgcaaatcacgcgcacgacaccgtgacgcttaacgattttgcagttacggcataatttcttgacggaagcacgaactttcatttttactctccgtaacttctaaagcaaaccgaattaacggttataacctttgaggtttgcttttttcaatgcagactcgtactgacttgacatcatcagagtttgcacttgagccataaagtccatgatgaccacaaccacgattaagagggaagtaccaccaaagtagaaaggtactttcattgcgtcacgcatgaactccgggattaggcagataaaggtaatatataacgcgccaactaaagttaaacgagtcattactttatcgatgtacttggccgtttgctctcccggacgaattcctggtacaaatgcaccggacttcttcaggttatctgctgtttctcttggattaaataccagtgcggtatagaagaaacagaagaatatgattgcagaggcataaagtaacacatagagcggctggcctggctgcagatacatagaaattgtcgtcagccaatcccagccagtaccatcaccgaaccaagatgcaattgtaccagggaacaggataatactggaagcgaaaatcgcaggaattacacccgccatattcactttcaacggtaagtgtgtactttgtgccgcgtaaacacggcggccttgctgacgtttggcatagttaacgacgatacgacgttgaccacgctccataaagacaacaaagcaagtaaccgcaaataccaagactgcaaccaatagcaacaggaggaagtgcagttcgccttgacgagcttgctcaatggtatggccaattgctgacggaagacccgcaacaataccggcgaagatgatgatcgaaataccgttaccgataccgcgttcagtaatctgctcacccagccacatcaggaacatagtccctgtcaccaaactcacaacagccgtgaagtagaacgcaaagcccgggttaataaccagaccctgcataccaggcatattcggtaagcccatcgcgataccaacagactggaacaccgcgaggactaacgtactataccgggtgtactggctaatcttacgacgaccagcttccccttctttcttaatctccgccaggcgcgggttcaccacgctcagcagctggataataatcgatgccgaaatgtacggcatgatacccagcgcaaagattgaagcacgactcaacgcaccaccagagaacatgttaaacatctcaatgatggtgccttgttgttgttcgagcaatttcgcaagaacagtggcatcaataccagggataggaatgaaagagccaatacggaaaacaatcagtgcgccgagcacaaacagtaaacgacgctttaactcacctattccgcctttagcactttggaaatctgtacctggttgctttgccatctgttacttattcctcgattttaccgccagcagcttcgataacagcacgagcgcctttagtaacacgcaggccgcgtacagtaactgcacgagtcagttcaccagacaggaacactttcgcgtactcaatctgtggaccaataacgtttgcggctttcaatacattaagatcgataacatcgccttcgatcagctgaagatcagataaacggatctcagcagtgaccatcgctttacgtgaagtaaagccgaattttggcagacgacgatataaaggcatctggccaccttcaaacccacgacgtacgccaccgccagaacgagagctctgacctttgtgaccacgacctgcggttttaccgagaccggaaccaataccacgacctacacgttttggtgcgtgtttagcacctgctgccggagacagagtatttaattgcatctgttactcctcaactttaaccatataggaaatacgattaaccataccacggaccgctggtgtatcttcgcgctctacagtgtggccaatatgacgcagacctaaaccgaccagagttgccttgtgttttggcagacggccgattgagctgcgggtttgtgtaattttaattgtcttagccatggtccattaccccagaatttcttcgacggatttaccacgcttagctgcaaccatttccggagacttcatgctgtctaaagcatccagtgttgcacgaacaacgttaattgggttcgtggaaccataagttttagccaggacgttacgaacaccggcaacttcaagaacagcacgcattgcaccaccggcaataataccggtaccttcgtgagcaggctgcataaacacgcgggaaccggtgtgtgtgcctttcactgggtggaataatgtgccgttgttaagtgcaacggttttcatgttgcgacgggctttttccatcgctttctggattgctgccggaacttcgcgtgctttgccgtaaccaaaaccaacgcggccgttgccatcacccactacagtcagtgcggtgaagctaaagatacgaccacctttaacggttttagatacgcggtttaccgcgatcagcttttcctgcagttcgccagcctgtttttcgatgtgtgccatcttacacctctaccttagaactgtaggccagcttcacgggcagcatctgccagtgcctggactcgaccatgatattggaaacctgaacggtcaaaggatactgctttgattcctttttccagtgcgcgctcagcaatagctttacctactgcgattgcggcatctttgtttccggtgtatttaacttgttcgctgatagctttttcaacagtagaagcggccaccaacgtttcagaaccgtttggtgcaataacctgcgcatagatatggcgaggggtacgatgtaccaccaggcgggttgcacccagttccataagcttgcggcgtgcgcgggtcgcacgacggatacgagctgctttcttatccatagtgttaccttacttcttcttagcctctttaatacgcacgacttcgtcggcgtagcgaatacctttacctttgtaaggttcagggcgacgataggcgcgtaagtctgctgcgatctgaccaataacctgcttatcagcacctttcagtacgatttcagtttgagtcggacattcagcagtaacgccagccggcagtttgtgctctaccgggtgagagaaacctacagacaggtttactacatcacctttaacggctgcacgataaccaacacctaccagttgcagcttcttagagaagccttcggtaacaccaacaaccatagcgttaaccagtgcacgagttgtaccagcctgtgcccatgcgtcggtataaccgtcacgcggaccaaaggttaactggttgtctgcatgtttaacttctacagcgttgtggatattacggctcagctcgccgtttttacccttaatcgaaataacctgaccgttgagttttacctctacgccggcaggaatgacgacgggtgcttttgccacacgagacattctttcctcccgaattatgctacgtagcagagaatctcgccaccaagaccagcctggcgagctgcacgatcagtcattacacctttagatgtagaaacaactgcgatacccagacctgccataacttgtggcagttcgtctttgcgcttataaatacgcagacttgggcggcttacgcgctggatgctttctacaacagccttaccctggaaatacttaagagtcagttccagttctggcttgatgtcgccttcgattttaaaatcttcaatataaccttcttccttcagcacgttggcaattgccactttcagcttggaggaaggcatggtgaccgcaactttgttcgcggcctgaccgttacggatacgggtcagcatatccgcgatgggatcttgcatgctcatctgtctttactcccgtgattcaatatggtgacaattaccagctagctttcttaaggcccgggatttcaccgcgcatagcggcttcacggactttaatacggcttaagccaaacttccgcagaaaaccgtgtggacgcccggtttggcggcaacggttacgctgacgggaaggactggaatcacgtggcagagattgaagcttcagaacagcatcccaacgatcgtcatctgatgcgttgacatcggagatggtagctttcagttctgcgcgttttgcgaagaatttctcagctaattttgcacgttttacatcacgtgctttcatagatttcttagccatgaataccctgccttacttgcgaaacgggaagttaaacgctgataacagtgcgcgaccttcatcatcagatttcgcggtggtagtgatagtaatatcaagaccacgaacacgatccactttatcgtaatcgatttcagggaagatgatttgttcacgtacgcccatgctgtagttaccgcgaccatcgaaagacttagcggacaagccacggaagtcacgaatacgtggtacagcaatagaaatcagtcgctcaaagaactcccacatgcgttcgccacgcagagttactttacagccgattggatagccctggcggattttgaagcctgcaacagatttgcgtgctttggtgatcaatggtttctgaccagagattgctgctaagtcagctgctgcgttatccagcagttttttatcagcaattgcttcaccaacacccatattcagggtgatcttctcgacccgagggacttgcatgacagaattgtagttaaactgagtcatcagttgtttaactacttcgtctttgtagtaatcatgcagtttcgccatcgtatactccaaaaattacttgatagtttcgctgttagacttgaagaaacggacttttttaccgtcttcgaatctaaaacctacacggtcagccttgccggttgccgcattgaagattgcaacgttagaaacctgaattgcagcttctttttcaacgatgccacctggttggttcagggccggaaccggcttctgatgtttcttaaccagattgataccttcaacgataactttaccagaagaaagaacctgttttactttaccgcgcttacctttatctttgccggtcagcacgataatttcgtcatcacgacggattttcgctgccatagttccgctccttagagtacttcaggtgccagtgagataattttcataaacttctcgttacgaagttcacgagttaccggcccaaaaatacgcgtaccgataacttgctcgctgttattgtttaacaatacacaagcgttgctatcgaagcgaatgacagaaccgtcagggcgacgtacacccttcttggtgcgcaccactactgccttcagaacatcacctttttttactttaccgcgcggaattgcttccttgatggtaattttgataatgtcgcctacagctgcgtagcgacggtgcgagccacctagaaccttgatacacattacgcgacgtgcaccggagttatcggccacgttcagcatagtctgttcttggatcattttagtgctccgctaaatgtcaactactactgagccactcttactaaaaagagaggccgtccaaatacccaattacgagggcgcggcattataacaccacatcttcgttatggatagaaaaaaataaacggctctaaagccgagccgtttattctacatcagaaagcagtgctgttacagtacagctttctctacgacgcgaaccagggtccaggacttagtcttagacagtggacgggtttcgcggatttctaccacgtcaccgataccacattcattgttctcgtcatgtacgtgcagtttagtcgtacgacggatgaacttaccatacagagggtgtttcaccatacgctcgatagtcacaacaatggatttctccattttgtcactaacaacacgaccttgcagagtacggattttatcggtcattacgcacccgccttctcagtcaataaagtcttaacacgtgcaatattacgacgcacttgttttaacagatgagactgttgtaactggccgcttgccgcttgcatacgcaggttaaattgttcgcgcagcaggttcagcagctcagtgttcagctcttcaacgcttttttcgcgcagctctttcgctttcattacatcaccgtcttagttacaaaggtggttttgataggcagtttagctgctgccagcttgaatgcttcacgagcaagctcttccgatacgccgtccatttcatacaggactttacccggctggattaaggcaacccaatactccacgttacctttacctttacccatacgcacttcaagaggcttttcagtgataggtttgtccgggaacacacggatccagattttaccctgacgcttaactgcacgggtcatagcacgacgtgctgcttcgatctgacgtgcagtcagacgaccacggccaacagctttcagaccataagtgccgaagctcacatccgcgccggctgccagaccgcggttacggcctttgtgcactttacggaattttgtacgctttggttgtaacattcagcgactctcctttacttacggcctttacgctgctgttttttaggttgagcagccggtttttccgcctgttcaactgcagccatgccacccagaatctcacctttgaagatccacactttaacaccgataacaccataagtagtctgagcttcagaggtgttataatcgatgtctgcacgcagggtatgcagaggcacacggccttcacgataccactcagtacgtgcgatttcagcaccgcctaaacggccgctgacttcgactttgatacctttagcgcctaaacgcatagcattctgtaccgcacgcttcatagcacgacggaacataacgcgacgttccagctgtgaagtgatgctgtcagcaactaattttgcgtccagttcaggtttacgtacttcggcaatattgatctgcgcaggaacgccagcgatatctgaaacgcttttgcgcagtttttcaacgtcttcacctttcttaccgatcacgatgccagggcgtgcagtgtgaatagtcacacggatgctcttagcagggcgctcgataacgatgcgggatactgacgctttttccagttctttagttaagtacttacgtactttaaagtcgctgtccaggttgtcagcgaattctttggtgttcgcaaaccaggtagagttccaaggtttaacaatacccaggcgaataccatttggatttactttctgacccattgctagtctccaggtatcagcgatcggacacaaccacagtgatgtggctggtgcgcttaagaatacgatctgcacgacctttagcacgaggcatgatgcgcttcatggttgggccgtcgtcaacgaaaattttcgctactttcagatcatcgatgtcagcgccatcgttgtgttctgcgttagcaatagcagactccagaactttcttcactaaaccagcagctttcttgttggtaaaggttaaaatttccagagcttgcgacactttcttaccgcggatcaggtcagccaccaggcgaaccttctgagcagaagaacgagcgtggcgatgcatagcaatagtttccatctcttcctcctaccttatttctttttggcttttttatcagccgcatggccgcgataagtacgggtcggcgcgaattcacccagtttgtgaccaaccatttcgtcggtaacgtaaaccggaacatgctgacgaccattatggacagcgatggtcaaaccgatcatgttaggaaagatcgttgaacgacgggaccaagtcttaacaggctttttgtcaccgctttccaccgctttctctaccttcttcagcaagtgcaggtcaataaaaggacctttcttgagagaacgtggcatggcttatcctctaattatttcttagtacgacgatgaacgatgaagtgttcagtgcgtttgtttttacgagtcttcttacctttggtctgaacgccccatggtgttacagggtgtttaccaaagttacgaccttcaccaccaccatgtgggtggtctaccgggttcatcgcagtaccgcgaacggtagggcgaataccacgccagcgacttgcaccagctttacccagaacgcgcagcatgtgttcagcgttacccacttcacctaaagtcgcgcggcaatctgaaggaactttacgcatttcaccggaacgcagacgaatagtgacataagcaccatcgcgcgcaacgatctgaacgtaagtaccggcagaacgtgccagctggccgcctttacctggtttcatttctacgttatgaacagtagaaccaaccgggatgttgcgcattggcagagcgttacccgctttgattgcagcatcaacaccagactggatttgatcaccagctttcaggcctttaggagccaggatgtaacggcgttcaccgtctttgtataataccagagcaatatttgctgaacggtttggatcatattccagacgttctacaacagccgggataccgtctttgttacgtttaaagtcaacaatacggtaattttgcttgtgaccaccaccaatatgacgggtagtgatacggccattgttgttacgaccaccagacttgttgtttttctcaagcagtggtgcgtaaggtttgcccttgtgaagctcagggttaaccactttaacgacgtggcgacggcccggagacgtaggtttacatttaacaattgccattgttctttactcctccgacttactcagcgccgccgacgaagtccagattctggccttcctgcagggtgacgtaagcttttttccagtcgctacgacgaccgaaacgctgaccgtggcgcttcactttgcctttaaccagcagagtgttaacaccttcaactttgacttcgaacagtttttcaactgcagctttgatttcagctttagtcgcgtctttagcaactttgagcacgatggtatttgttttttccatcgcggtagacgctttttcagatacatgcggcgcgcgcagtactttcagcagacgttcttcacggatcatgccagcatctcctcaacttgcttaactgcttcagcagtcatcactactttaccgaacgcgatcagactgaccggatcgattgcagtgacatcacgcacatcaaccttgtacaggttgcgagctgctaagaacaggttctcatcaacttcgtgtgtgacgatcatcacgtcttccagagccatatctttcaatttctgtaccagcagcttggttttaggtgcttctacagcaaatttttcgacaatgatcagacgatcctgacgtaccaattcggacaggatgcttttcagcgcgccgcggtacatctttttgttaactttttgactgtggtcctgtggtttcgctgcgaaagtgataccaccagagcgccagattgggctcttgattgaaccagagcgggcacgaccagtacctttttggcgccatggttttttaccagacccagtaacttcagcacgagttttctgagcacgtgtaccttgacgagcaccagctgcatacgcaacaactacttgatggacaagcgcttcattgaaatcacgcccgaaggtagtttcggaaacagtcagcgcgctttgcgcgtctttcattaccaattccattcctatctcctcgacgttaagccttgacagctggtttaacaatcaggttgctaccggttgcacccgggacagcaccttttaccagcagcaggttacgctcagcgtcaacgcgaacgacatccaggctctgaacggttacacgttcgttacccagctgacctgccattttcttgcctttaaataccttacccggagtctggttctgaccgatagaacccggaacacggtgagacaaggagttaccatgagtagcatcctgagtacggaaattccagcgctttacagtaccggcgaagcccttacctttagatgtaccagtaacgtcaactttcttaacgtcagcgaaaatttcaacgctgatgttctggccaacagtaaactcttcaccttctgacaggcggaattcacgtaacaggcgaccagcttcaacaccagcttttgcgaaatgtcctgcttcaggtttgttcacgcggttagcttttttgctgccggtggtaacctgaatagcacgataaccgtcagtttcgtcagatttaacctgagtaacgcggttattttcgatttcgataacagtaacagggattgacacaccttcttcagtgaagatgcgggtcatacccacttttttaccgactaaaccaatcattgtttcaacctctcaatcaattgatacctgattaacccaggctgatctgcacgtcaacgccggcagccagatccagacgcatcagagcatcaacggttttttcagttggctcaacgatgtcaaccagacgtttgtgagtgcgaatttcgtactgatcgcgcgcatctttgttgacgtgcggagagatcagaacggtaaaacgctctttacgggtcggcagcggaataggaccacgaacttgcgcaccagtgcgcttagcagtctctacgatttccgcagttgattgatcgatcagacgatgatcaaaagctttaaggcggatacggattctttggttctgcatgagaccagagctccaactattttataaacgtaaaaaattactcctcgcacccatttcgattgacgggggagtgtaatcgttctcgatgtaatccccatatcggggatattttcatgaacagctaaaaaacatactgtccaatgctggtatcaaccaggcttgcacaattggcaagcccgcgcattatacgtgaatgagccctgaaagcaagccgcaaaccgggatttgtgcaaattatctccggcgccatgacaaaaaatcaaaaaagaaaaaccgccgcgggtttccctgccggcggttctgcacattgcttactttagtgattatttctctgttttttattctgtgtctgcgtccgccatctgtgcctgctgatagttctgcagacccacacgggctatcagatccagctgggtttccagccagtcgatatgagactcctcttccgccagtatttttatcatcaaatcacggctgacataatcatgtttggaatcggcataggcaatggcttcacgtaaatctttggcgccatccagttccagctgaagatcagacttcagcatttcttcaacatcttcgccgatatgaagtttaccgagatcctgaaggttcgggatcccttccagaaataagatacgctcaatgtattcatcagcgtgtttcatctcatcaatggattcttcatactctttgttgttgagtttaatcagaccccagtttttgaacatgcgggcatgcagaaaatactggttaatagcaaccagttcatttcccagcaatttgttcagatgcgagatcatttttttatcgcctttcatgtaccctcctttgtttcctgtctgttcagtatagacacaggaaataattcacggagtgattacggtgacaaaatagcgatacagttcaaaattccggcgggtttcagagagaagattcaggcgacgcggtcaaccgggacagacatatgctcttctgcaataacggctttggcgtggcggatacatttgccgcattcagtgccgacagggataattttacgcagttcaccgatggaatgaaccttattctggcgcacggcattccggatggctttatcgctgatggcattacataaacatacgtacatatcattcctcctgactgcggtaaagagtaaatgataatcagtattattacaattgcgattgtgtaaattttgtcagcagttgccggaaagccggcataaaaaaagagagccgcagctctctttttaataatcagcggggaattaacccatcactttcgctacaacacccgcaccaacggtacggccgccttcacggattgcgaaacgcagaccatcgtccattgcgattgggtggatcagggtgacgatcattttgatgttgtcgcccggcattaccatttcaacgccttccggcagttcgatagtacctgttacgtctgtggtacggaagtagaactgtggacggtagcctttgaagaatggagtatgacgaccaccttcatctttgctcagaatataaacttctgattcaaatttggtatgtggtttgattgaacctggtttagccagaacctgaccacgttcgatttcttcacgcttggtaccacgcagcagaacaccgacgttctcacctgcacggccttcgtccagcagtttgcggaacatttcaacaccggtacaggtggttttcgcagtatctttgatacccacgatttcaacttcctcaccaaccttgatgataccgcgctcaacacgaccggtaacaacggtaccacggccggagattgagaatacgtcttcgattggcagcaggaacggcttgtcaattgcacgctctggctcagggatgtaagaatccaggtagcctgccagttcaacgattttagcttcccactctggctcgccttccagtgctttcagcgctgaaccgcgaacgattggcgtgtcgtcgccagggaaatcgtactgagacagaagttcacgaacttccatttcaaccagttccagcagctcttcatcatcaaccatgtcacatttgttcaggaatacgatgatgtaaggaacgccaacctgacgacctaacaggatgtgctcacgggtctgtggcatagggccatcagttgcagcaacaaccaggatagcgccgtccatctgtgcagcaccggtgatcatgtttttaacgtagtcggcgtgccccgggcagtcaacgtgcgcgtagtggcgagtcggagtatcgtactctacgtgagaagtagagatggtgataccacgtgctttttcttcaggcgcgttatcgatctggtcgaatgcacgagcgttaccgccgtaggtttttgccagaacggtggtgattgcagcagtcagggtagttttaccgtggtcaacgtggccgatagtaccaacgttaacgtgcggtttcgtacgttcaaacttttctttagacattagttgtccctctaagacacggaatcggtggtttcaccacatcaaccaagcagtattgcttgtctggatatttacagggaaaaaaatcaaggaatggagaacaacggaagtggtgctgataggcagattcgaactgccgacctcacccttaccaagggtgcgctctaccaactgagctatatcagcacatcttggagcgggcagcgggaatcgaacccgcatcatcagcttggaaggctgaggtaatagccattatacgatgcccgcgtgaactcggctacctgactttaatctgctgtaactgaatccggagtattttacatcgaaggagtcttgagtaaaacactcaggataataattcacattagatggtggtgggagaaggattcgaaccttcgaagtctgtgacggcagatttacagtctgctccctttggccgcttgggtatcccacctttccaaattgttaaatggtgccggcaccaagagtcgaactcgggacctactgattacaagtcagttgctctaccaactgagctatgccggcatcaagtgctgcgcattctatggagactttgcgcaggatgcaacaaaaaaatcgctgaaattgttcttttgctcacaaagtggacattcttccgtattttgctgtttttttcaataggtaatgtacaaattagcagcgatacttatcacttaaactctcagtaatcacacagatggactaccgtaaaaaccaataatccgcttatttttgactccttgtttatgtcatgcgcaatgtaatttatgtccgcgacatcaaaaaaaatgcattttttcaaaaaaattgctacgcctgactctcatctctcgctatgatgcgatttattttcagccggtacgggtattaatgacctgtccaacctgcgtaataaaggcagctgttggtttatgtataaagaaaaatcgctctctccttatctccatttcagccgcagtcagtgggcgaccctgcgtaactccgttccgatgacgttgtctgagcaggaaattgacgatctgcgcggtatccacgatgaaatctcgattgatgaagttatcgcgatttatctgccactgtcccgtctgctgaacttctatatcagctcaaacctgcgccgtcaggccgtactggagcagttcctcggcagaaatgaagcgaaagtcccttatgtgattggtattgccggcagtgtgtcagtcggaaaaagtaccaccgcccggttattgcaggcgctactgagccgctggccggaacatcgcaaagtggatttgattaccactgatggttttcttcatcccaattctgtgctgaatgaacgcggtattatgaagaagaaaggattccctgaatcctatgacatgcataatctggtgcgtttcgtttctgaagtgaaatccggtaccccgcgggttctggcgccggtttattcacatctgacctatgacattatcccggataaacagttagtggttgagcagccggatatcgtgatcctggaaggcctgaatgtgctgcagagcgggatggattatccggaagccatgcaccatgtgttcgtgtccgattttgtggatttctctatttatgtggatgcgccggaagaattactgaagagctggtatatcgggcggttcctgaaattccgtcagggcgcattcagtgatcctaattcctatttccatcactatgcgcaacttgaggaaagtgaggccgtcagcattgcctcaacaatctgggatgagattaacggcctgaatctgcatgaaaatattctgccgaccagagagcgggccagcctggtgatgaccaaaggcaccaatcatatggtgaccaatgtgaaactgcggaaataatcagtttttctgttaaaaataaaccggctcaggccggtttattttttgaattcacaccgcgaagtgatatttctccgccgatatagggggtaatttcaccaaactgatctaataacaaagcaccctgcccgtttatccctctggaaacgccaaagacctcacgctcaccaataatcagttttacttcacgattaaggtaattatcaaaagcataccagcgttcaataaacggggtcagtccgcttttttcgaacaagtgcaacgcatctgtcagatgtttaataaactctgcagataatatattacggtcgatctgaataccggattgctgcagattgatccactgctggccaatctgatctgtaccactactttccatggtcaggttaatcccgatcccgataaccacatgcgcggcatccccggtttttccctgaagttcgaccagaataccggccagttttttgtcatccagatataagtcattcggccatttgacttttacaccggtcgcacccagctcatgcagtgtctcagcaagcacaataccgactaccagactcagcccgatagccgctgcgggtccctgctcaagacgccagtacagagaaagatacagattgcggccaaacggagagatccactgccgcccgcggcgaccgcgtccggcatactggtattccgccacacaggcatcaccggatgtcagttccccgactttatccatcatatgctgattggtggaacctatgaccggcagcacttcgacatttcgcccgggcagcagcgtgcggataacatcgggctgtaacagattcatcggtgcaaagaggcggtaacccttaccggtgaccgtttccatctctatacccatctcacgtaaggtgcggatgtgcttattaactgcagcccgggtcatccccagcttatcgccgagttgttcaccggaatggaactcaccgtcggataaaatgccaatcagcgtcagcggtacactgtaatctttcatgcaatagcctctgtggcactgatttcaccgtccgtgccgataaaacggacttccggctccagctgaaccccgaaacgggcagcaacctgctgacggacataacgggcgagacggataacatcatcacctgttgcattatcacggttaatcaataccagcgcctggttcatatgcaccgctgcaccaccttcctgatggcctttcagctgacactggtcgataagccagccggcagcgagtttgattccgtccgccaccacatactgcgggcagtccggatactgtgctttgattttctgcgcacactcagcagtcacaaccggatttttaaaaaagctgcctgcattgccggttacagccggatccggcagtttgctcatccgcatctgacagaccatatcaaatacctgctgaggtgtgacagtcgctggatccagcgatttcaaatcaccgtagctcagattcggtttccatactttcggcagtttcagtcccaccgctgtgatagcatatccctgctgataatcatgtttgaaaatactgtcacggtagccaaagcgacattcctctgcagtcaggcgtgttgtctgcccgtctgacagagaggtgacatccacatagtcacatacgtctttaaattcggtaccgtatgccccgatattctgaatcggtgcagtaccggcacagcccgggatcagcgccaggttttccatgccgtaaatactgttcgccagcatccagcggattaattcatgccagttttcgccggcaccaacttcgataaaccaggcatccggtgtttcccggacggtcttgccggggatctggttaatgacaacggtgccattgaaatcctcagtaaacagtacattactgccgccgcctaacagcaggaagggggatttttccgtttgtgcagccagccataagcggcagagatcagaaatggtctctgcgacatcaatatgccgggcaccggcttcgataccaaatgtatgtaactggcggagtgaatcagcaggtttgagggacataatgaaaaactcatctgacaaatatgctgtctagtttatcagtccgcagacgcggatcccagcactgcgggaatttgtattttggcggactgcaaatgcaaaaaagccactcagatgagtggctttctttaaatataaaacctggcggttccctactctcacatggggagaccccacactaccatcggcgctacggcgtttcacttctgagttcggcatggggtcaggtgggaccaccgcgctacggccgccaggcaaattcttttcaatttctgccgaactaaattaatggtgctgatacccagattcgaactggggacctcacccttaccaagggtgtgctctaccaactgagccatatcagcaaaaatctgcgcttttgcacagactttaaataataacctggcggttccctactctcacatggggagaccccacactaccatcggcgctacggcgtttcacttctgagttcggcatggagtcagggagaactcatctcggggcaagtttcgtgcttagatgcttttcagcacttatctcttccgcatttagctaccgggcagtgccattggcatgacaacccgaacaccagtgatgcgtccactccggtcctctcgtactaggagcagcccccctcagttctccagcgcccacggcagatagggaccgaactgtctcacgacgttctaaacccagctcgcgtaccactttaaatggcgaacagccatacctttgggacctacttcagctccaggatgtgatgagccgacatcgaggtgccaaacaccgccgtcgatatgaactcttgggcggtatcagcctgttatccccggagtaccttttatccgttgagcgatggcccttccattcagaaccaccggatcactatgacctgctttcgcacctgctcgcgccgtcacgctcgcagtcaagctggcttatgccattgcactaacctcctgatgtccgaccaggattagccaaccttcgtgctcctccgttactctttaggaggagaccgccccagtcaaactacccaccagacactgtccgcaacccggatcacgggtccacgttagaacatcaaacattaaagggtggtatttcaaggtcggctccatgcagactggcgtccacacttcaaagcctcccacctatcctacacatcaaggctcaatgttcagtgtcaagctatagtaaaggttcacgggtcttcccttctcccccaactgcatcttcacagcgagttcaatttcactgagtctcgggtggagacagcctggccatcattacgccattcgtgcaggtcggaacttacccgacaaggaatttcgctaccttaggaccgttatagttacggccgccgtttaccggggcttcgatcagaagcttcgccttgcggctgacctcatcaattaaccttccggcaccgggcaggcgtcacaccgtatacgtccactttcgtgtttgcacagtgctgtgtttttaataaacagttgcagccagctggtatctgcggctggcttcagctccgtgggtaaaccacttcacctaatgccagcgtgccttctcccgaagttacggcaccattttgcctagttccttcacccgagttctctcaagcgcctgagtattctctacctgaccacctgtgtcggtttggggtacgattaatggtaacctggagcttagaggcttttcccggaagcagagcatcaatcacttcaccaccgtagtggctcgtcgtcacgcctcagtgttaacaaccgaccggatttgcctggtcagtccacctgcacgcttaaaccgggacaaccgtcgcccggatgatttagctttctccgtccccccttcgcagttaccaccagtacgggaatattaacccgttgcccatcgactacgcttttcagcctcgccttaggggtcgactcaccctgccccgattaacgttggacaggaacccttggtcttccggcgtgcgggtttttcacccgcattatcgttacttatgtcagcattcgcacttctgatacctccagcatgcctcacagcacaccttcacaggcttacagaacgctcccctacccaacaatatttacatatcgctgccgcggcttcggtgcataatttagccccgttacatcttccgcgcaggccgactcgaccagtgagctattacgctttctttaaatgatggctgcttctaagccaacatcctggctgtctgagccttcccacttcgtttcccacttaattatgactttgggaccttagccggcggtctgggttgtttccctcttcacgacgaacgttagcacccgccgtgtgtctcccgtgataacattctccggtattcgcagtttgcatcgggttggtaagtcgggatgaccccctagccgaaacagtgctctacccccggagatgaattcacgaggcgctacctaaatagctttcggggagaaccagctatctcccggtttgattggcctttcacccccagccacaagtcatccgctaatttttcaacattagtcggttcggtcctccagttagtgttacccaaccttcaacctgcccatggctagatcaccgggtttcgggtctataccctgcaactaattcgcccagttaagactcggtttccctgcggctcccctattcggttaaccttgctacagaatataagtcgctgacccattatacaaaaggtacgcagtcacaccccgaagggtgctcccactgcttgtacgtacacggtttcaggttctttttcactcccctcgccggggttcttttcgcctttccctcacggtactggttcactatcggtcagtcaggagtatttagccttggaggatggtccccccgtattcagacaggataacacgtgtcccgccttactcatcggactcacaacaccagtgctttcagatacagggctatcacctgctgtggccagcctttccagactgttctcttaacactgatgctgattaaggtcctgggctgctccccgttcgctcgccgctactgggggaatctcgtttgatttcttttcctcggggtacttagatgtttcagttctcccggttcgcttcattaccctatgtattcaggtaatgatagtgcaacgaattgcactgggtttccccattcggaaatcgccggttataacggttcatatcaccttaccggcgcttatcgcagattagcacgtccttcatcgcctctgactgcctaggcatccaccgtgtacgcttattcgcttaacctcacaacccgaaggtgtttcgactgagtgtttctgtggggttatggctgcgcgcccctcatttctttgtcgggcggtgctcgcaatactcacatactgatgtatgctccgcttgctgtgctccgtccttcgcgaactgaggactgctcgctcataactcacgcaaaaacgtcttcacattttcgtgttgttcggctgagagactcatcaatattacctcggtcataatattgattgtttcaatttttcagcttgttccggattgttaaagagcataattgttaagctgactcttgaatcagcttaatcattatttgcagataactttcactcatccgcgcagactggcgtcccctaggggattcgaacccctgttaccgccgtgaaagggcggtgtcctgggcctctagacgaaggggacattagtcagcttcgcagacgctctctgctcattttctatcagacaatctgtgtgaacactcacattcaacatcaactaggtaaggaggtgatccaaccgcaggttcccctacggttaccttgttacgacttcaccccagtcatgaatcacaaagtggtaagcgccctcccggaggttaagctacctacttcttttgcaacccactcccatggtgtgacgggcggtgtgtacaaggcccgggaacgtattcaccgtagcattctgatctacgattactagcgattccgacttcatggagtcgagttgcagactccaatccggactacgacgtactttatgagttccgcttgccctcgcggggtcgcttccctttgtatacgccattgtagcacgtgtgtagccctactcgtaagggccatgatgacttgacgtcatccccaccttcctccggtttatcaccggcagtctcctttgagttcccgccatcacgcgctggcaacaaaggataagggttgcgctcgttgcgggacttaacccaacatttcacaacacgagctgacgacagccatgcagcacctgtctcagagttcccgaaggcaccaaagcatctctgctaagttctctggatgtcaagagtaggtaaggttcttcgcgttgcatcgaattaaaccacatgctccaccgcttgtgcgggcccccgtcaattcatttgagttttaaccttgcggccgtactccccaggcggtcgacttaacgcgttagctccggaagccacgcctcaagggcacaacctccaagtcgacatcgtttacagcgtggactaccagggtatctaatcctgtttgctccccacgctttcgcacctgagcgtcagtctttgtccagggggccgccttcgccaccggtattcctccacatctctacgcatttcaccgctacacatggaattctacccccctctacaagactctagctgaccagtatcagatgcaattcccgggttaagcccggggatttcacatctgactcaatcaaccgcctgcgtgcgctttacgcccagtaattccgattaacgcttgcaccctccgtattaccgcggctgctggcacggagttagccggtgcttcttctgtcggtaacgtcaattgccaaggttattaaccttgacaccttcctcccgactgaaagtactttacaacccgaaggccttcttcatacacgcggcatggctgcatcaggcttgcgcccattgtgcaatattccccactgctgcctcccgtaggagtctgggccgtgtctcagtcccagtgtggctgatcatcctctcagaccagctagggatcgtcgcctaggtaagccgttacctcacctactagctaatcccatatgggttcatctgatggcgcgaggcccggaggtcccccgctttggtccgaagacattatgcggtattagctaccgtttccagtagttatcccccgccatcaggcagatccccatacattactcacccgtccgccgctcgtcagcagagaagcaagcttctccctgttaccgcccgacttgcatgtgttaggcctgccgccagcgttcaatctgagccatgatcaaactcttcaattaaaagtgtctgatgctcaaagaattaaactgtttactgctgcttattactaagctgctgtattggtcactcttcaagacttctcaaaaataatattttttgtgatatgtcctgcgagtgcccacacagattgtctgataaattgttaaagagcagttgcaacattcgctgccgttgccggtcttctgcgttgttgcgaggctgcgtatattacgctttcctcatttggtgtcaagtatttattttcagacttttcaccttgttatctcagcagacttcgcgttctgtgctgtgacaacggatgcgcattatagggagtttttatctgaccgcaaggggtaatttataaaaatgtgctgactgctgattaatgcagcaaatcatcctgtaatcgtcagttttttcagcgattcgagtcccaattgctgcaaaacaggctgtaatttctgtgtcgtttcatcatcccgcatgcaatacgccacatttttttctgcggttaagtgatgaggtttctcactgttattgattaaccactgtacgcggcgggcaatcgccgccccggaatccaccagccgggtgccgtcaggtaatgctgatttcagttcttcggcaatcagcggaaaatgcgtacatcccagtaccactgtgtcaggcggctctttcatattccgccacggcgcaaggatagtttccagggcacctgccggaatcgcctcaccatacagcttgcgctctgcgagttcgaccagctccgccgatcctaatagtgatacctgacactcagaagcaaaccggtcaatcagttcccgggtgtaagcccgttttaccgttgcccgcgttgccagcagcccgaccaggccgttgcgtgtcagtttcgctgccggtttaatcgccggaaccacgccgaccaccggaatatcagacattgcacgcagtgcaggcagcgtaatggtgcttgcggtattacaggcaatgacaatcactgccagcggatgctgctgagcaatctggcggacaatcttagtcacacgttcgacaataaaggcttcggttttttcaccgtaaggaaacgcctcattatcgaatgcatatatatagtggagatcaggaagtaattgtcttacttcctgatagacagataaaccgcccatgccggagtcaaacagcagcactgtcgggcgggttttcggatcagaagttgtagcttcctgtaaggaagtattcgcggccagcggttcgatagccatacgcagtctcgtagtctttatcaaacaggttagctactttaccacgaattgtcagatggtcagtgatcggatatgcagctgtgatatcaaaaacactggcaccgccgagtttttgcttattcgccgcatcatcataacgtttaccgatatactgataggtcagccccatatcaacatcggccaccgtccagtccagctgatatttaacctgctgctgtgcacggcgcgccagacgcttatccgtctctttgtcttttgcatccaggtattgataagtcatctgatgatggaaaatccaggtatcaaattcccctacccactcgacacctttgattttggcttttttgatattctgatagttacccggttgcccatttgttcctgatctgaaatcaattaattcatctatatcattgtggtatgtccctaatctccaattcaattcaccggtcaacccctccagagcaacctcccactgcttgctttcttccggtttcaaatcaggattaccctttacaccatagtcaggataaaaaggatctggttgatacgcatacatctggccaatatttggtgctttaaatgctgttgcataggatcctaccagccggtagccatcaataaattcccaccccgcacttgtctgccatgtcgtatgccatccggactcggattggtgatctgatcgcacagctccttccaatgtcacagaatcaatctgttgctgccctgtaatatataatcctgtatctgaaagtgatttactttccggtgtcatagatgtgccgggttgaatagtctgtttttgataatcaattcctgaacttaagcctccattgcccagttgcagatgattaccccactgaaggctatattgcttagagtcatctaatgcccgaccttcagcataacgcccagcctctccgttaaaattataatctttagtatgagtgaggctaaaagtgagctgagtagaataaatgtcccggttaaaacttccgccaatatcaaatgttctgctttctaattcacgggtatccatcgcgccagccatccagggatgataatttgaatgattgttaaatccgtaaactctcgtaaaagcagaaatttcatcagaaaaattatgagttgcgcctaaccacagtgttttgtttaaaaaaccataatgcctgtctgatggctgatatttattcgtatagtcagagataatatcgtaacccttcgaatcagtataagcaccggcagctgtaatctgtgtattctcaccaattttttgctgagtggtgcccgaataattctggaagccattagagccaactccggctgtaatatttgagccaatatcatcacgtagcgtgataatatttaatacaccaccaatagcatcagaaccataaactgctgagcgagccccgcgaatgtattccacgcgttgtaccaaagctatagggaactgattaagatccgcagctcctgcaataccggcattattaagtctgataccatcaatcaagactaacagatgttttgcatctgttcccctgacagagatagaactcgcctgcccaagcccaccattctgagcaacatccacacccggcagtctccgcagcacatctgccacagaattcgactgccacttatctatctcttcacgggtcacaacggttaccggcgccagcacggacgaaaccggctgctggaagcggttagcagaaacaattatctgatcatcattagtattagcagaagcgctaaacgataacgcggaaaacacggccagtccgacagcggacagcgcataaggcgaggtcattttcattttttcctgagcacccacatatatataaagaggatgccacccgtctgctttgtagcgtcagcaggacggacgacaaatcttcggcaggtcttcggactcaggagggtactacgttattccccgcaacgacttcccgtcatttataacagtgtcatcgtgttgcttttaccattaccgctgcgcgccagttccggaatttcaccggattcccttttcattcttatgaagaaaccgaattatcatgctacgatccggttttaaaacctgtccagagtaagatatctgaattgtcgggcgggacactttattcataaacacacgaacaatttttgtgatcagcaaaacggatcgacgcgccatgcataacacgttacctattgaaaattatgaagaacaacttgcggagaaggtaagaagtctgcaaacaatgatgcagccttttcaggcgccggatgctcacgtatttgcgtcaccagtttcacactaccggatgcgcgccgaattccgtatctggcatgaaggggatgacctctggcatatcatgtttgatcagcagaccaaacagcgtatccggattgataccttcccggccgcaagccagctgattaatgacatgatgcaggccattttgccgttactgaaacagactcatcttctgcgtcataaactttttcagattgattatctgtcgacacgcagcaacaaaattattgtttccctgctctatcataaaaaactcgatgacagctggacagaggccgctaaaacattacgggcacaattgcagtcacagggttttgatttacagttgattggccgtgcctctaaaacaaaaatcatgctggataatgattatgttgatgaagttttaccggtcgcaggtaaagagatgatttaccgccaggttgaaaacagcttcacgcagccgaatgcagcggtcaatattcatatgctggagtgggcacttgccgcgacagaaggttcacagggcgatttgctggagctgtattgcggtaacggtaatttctcactggcgctggcgcgtaatttccgccgcgtgctggcaaccgaaattgccaaaccgtcagtggctgccgcgcaatataatatcgatgctaaccatatcgataatgtgcagattatccgtatgtccgcggaagatttcacacaggcgatgcagggcgcgcgtgaatttaaccgcctggcgggaattgatctgtcctcttatgaatgtaataccatatttgtcgatccgccgcgcagcggactggatgcggaaaccgttaaactggttcagggctacgagcggattctgtatatttcctgtaatccggaaacattatgtgaaaatctggaaacactgaaccagacacatgatgtcgtgcggctggcgctgtttgatcagtttccgtacaccccgcacatggaaagcggcgttttgttgatccggcgcggataagttgttacgtgtttccccggaaagttcttgatcgttgatcaggaacttttttactttatgagtttatatcaattatttctttatgatctccggctggcgccccggttttcttgattcatcagaatgatccactgagcccgctgataaacggtgaaaaatacatcataaagtgacatttaaatcctgtaaatattcattcaacgaatattcattacactcataacatttcagagacaaaaaataaccctcacgcaatagattaacaacccgcccaagaccattaaaaaaaacgtttgcggtaaataaatatttaacaatttactgtgagctgttcctgatattaattattcttctgaatttaaggtcttattttcattttcactcatctatactcggccgtaaataatcccgcaacttaatcgaaaggtatttttatgtctctgaagaaaatgacgttaatttcagccgccctgttatttggtagttttcaggcaaatgcgcacaatatttggattgaacaaactgacggctctgattatgttgtccgttttggtcataatccgacagaaaaatatccggaaaataaattaaaaccggttcaggctgtaatgcatgacggtaaagtggaaaccgtcagtaccacctttaaagatggcgaagcttactttgtcatgcctgagaatgcgtcaattatattattaggttacgacaacggtgtctggagtaaattaaagaatggccgcaccgttgagaaaaataaaattgaagtaccggatgcggagttcagcaagaacccgattaaattcagcaaaaatatcgttaagtgggatgacaacgctacaaaagtctttaacaccccttatgagctggtaccgatgactaaaccggtggccggtcaggagtttgagatcaaagccctgaaagatggtcagccgctggaaggcatgaaaatcgccaaaagcgaagaagacccgggtgtgctgaccaacaaagacggcctggcaaaattcaaagttgaaaaaggcgccaataaagtttacgccgaatacaaactggatacaccggataataaagagtacggattccagcagcttgaatatgttttatcttttgacgctgagtaattaaacgttatgaaatctgtttatttatttgctattttactgattaacggggtgctgttggcaacaacagcacaagctcactccatgcatgtggttgcacagctggaaggtaatgtgatcagcggccagtcttattattctgatatgtctccggcaaaagatacttatgtcggtacgtatctgaaaggccacgaagatgatgaaatatccggtaagactgatgaaaaagggtatttcaaaatcgaagtcccggcgacaggtgattatattctctatgttgaaggtgatgaagggcataaagtggaaacggaagtgccggttatttccgctgcagccaacaccggcagcagtgattcctcttccggttatattcagatccgccaggatattgaccagctgaagaataaaatctatctgcagaatattctcggtggtgtgggctatatcgtgggtattttcggtgtgattgcattcttccgtgcccgtgaattaacaaagcaggccgctaaaaacgccgcataacaggaggaagaccatgcatttatctgaaggcgtattacatcttcctgttctggccggtgccggtgtggtggctgcggccggggttgccatcggcatccgccagctggatacctcgcgtctgtcactggcagccctgttcggggcggcattctttgttgccggtaccatccatgtgccgatcggggtcagcagtgtgcatctgatcttaaacggacttgccggattgttcctcggctgggcggttttcccggcattcctgattgccctcgcgctgcaggtgctgtttttctccttcggcggctttgcggttctcggggttaacctgtgtaatatctctatcccggcgctgctggtctattacctgttccgtaactccctgcgtccggggctgagtcagggacgtctggtttatctcggggtaatggccggggttatcggtacgctgggtacggtgtgcctgacctcgctggcactggtgctcgacagcggtaaatcctatatcgatctggtctggctgctgtttatcggacacctgccgatttttgtcaccgactccctgatcagtgtggggatcctgctggcgctggccaaaatgcgtccggcctccctgatggtcaatcagcccgggcagcatacctatggataaatggctgcctcctcaccggcgcctgcttcttgctgttctctgggcttttctgctcagcggtatccggcagaccgactggcttattgccggtctgtcgggtgcttttctgctgtttgttgtctgccgccgccgtcagttgggccgttcactgctgacggtgctgaaactgaatattttcatcctgtttgtctggctgacactgccgtggaaaattgagagtcagggcattgttcagtccccggccggggtgtttctcgccctgcaaatcacgctgaaaatgaatgcgattctgctgtttgtctctgcgatgctgacaaacatgacagatatcgatctggcgtgtgcggtgaaacgttatcccctgcccgataaactgataaagctgtttattctgactatccgttatatcgcgattttcagcgaaaccaaacaacagcttgaaacggccatgaaagcccggggattccgcaaagggatgaataaacggacatttaccatgttgtcccaattggtcgccctgctgctgatcaaagccatgcacaaagcggaaaccactgaaatggcgctgaaagcccggggtttttacgcgcgtccgtcttctgttaatacaaaaaggtctgttaatgacgtcccaaaatcccctgattcaggtcagcaatctggttgtcagccgcaacaatgcgccgataattcaggatctgagctttgaactgaacgccggagaacggctttttctgtgcggtgatatcggcagcgggaaatcaacactgctgcacacactgttaggttttatcccgttcaccggggatatttcggttttcggtaaatcccgtctttccgaagatgatttcacagaggtgcgcggccctctgggattgctgtttcagcatccggatgatcaactgttcggcccgggtgtgctggatgatgtgatgtttggtccgctgaatatggggatgacacaggatgcggcgcgggaacgcgctttacagtgcctggaaatgctggatattgtccggctgaaagaccgcgctgtgactgagatttccggcggagagaaaaacttcaccgcactggccggtgtgctggcaatgtcgccgtctgttctgttgctggatgagccgaccaacggactcaatgagaaaaatattcagcgtctggaagacattcttacacaactggatctgccgatgattgtggcctcgcataatcagcagtttacacagcggatggcgcactgcgtgatcccgttcccctgccgctcctgagcctgatataaaaaacccccggcagcggttgtccggctgccgggggtctgttcagacggatcgtaatcaggcgtccacaaataccattttaagaataaacagcagcgataccaccaccacacacaggttcagctcacgccagcggccggtacccagcttcattgcgcagtaagcgataaaccctaatgcaatcccttctgtgatagagaagctgaacggcatcatcacggcagtcacaaacgccggaacggattcggtcagatcattccagtttacccgcaccaggctggaggtcatcagcacaccgacataaatcagtgcccctgcagtcgcataggccggcaccattgacgccagcggtgaaataaagatagccgcgaggaacagcaggccgaccacgatagctgtcaggccggtacgcccgccgacagaaaccccggaggtactttcaataaatgcggtaacagaggacgtccccatcgcagaaccggcgacggagctgatgctgtccacatacagcgcttttttcatgttcgggaaacgacctttttcatccgccagcccggccttatcagtcacgccgatcagggtgccggaggagtcaaacaggttcaccagcataaacgagaagataatcccggcgagagataaatccagcgcgcccataatatcaacatggccgacaaccgaggtgattcccggcggcacatcaaacacgcccttgtaggtcacatccccgaggaaaagtccgatggaggttgtcaccacaatcgataccagcaccgcagcatggatattgcgcgcggccagaatggcgataataaagaagcccagtgcacccagcaccacactgtgatcggtaaacttaccgatagtcaccagggtatccgggttcggcacaataataccggcgtttttcagccccatcatggcgataaacagcccgataccactggtgataccgacccgcagactcagcgggatatgggcaatcagccagtaacggatgcgcaataaggtcaggataaacagcccgaccgcaccccagaaaatcgcgcccatcgccacttcccaggagtagtgcatcgcgcctaccaccacaaaggcgaaaaaggcattcagccccattgccggcgcaaccgccaccggcaggttagcaaatagccccattccgatactgccgatggcagcgatcagacaggtggtgacaaacaccgctttgatgtccatcccggcgaacgagaggatctgcgggtttacaaaaatgatatacaccatggtgaggaaggtggtcagcccggcaataatttctgtgcggacagtggtaccgtgttcctgtaatttgaacacgcgctggagcaggccctgatgaggatcagtgccggaagtcggagtagtcatgaataagaagtcccggaaatttgtttttttcggcttatcctaccgcatcgttttcaaaaagaaaacgtttgcgtttcattgcgggaaaatcccggccattaaccgtaccgggattgttactgatcaaacttatgatgaacaggatgccggtttttctgacagccgtaccggtttctctcttccccggccaaacagacgggcaagccacgactgacggggctgccgctgtaatgaataacggcgcatcagcgcatttgcccccagttccagcccggaacacatcacaaaatagataaaagcaacaaacaggaaaatctctgtcgggtagaccatactgcggttattgacctgagacgcaaggaacgacaactcccccacaccgacgatataggccagcgaggtatctttaatcagcgcaatccactgattaataaaggacgggatcatcatccgcagcgcctgcggcaacacgatatgccacagcacttcccaccggctgaaaccgagagacatccccgcctgccactgccctttgcctattgccagaataccggccttcacaccgtgggcgatataagccgaggtaaccagcgccagtgcgcagacgaccgtggtaatttccggcacatccacaccaaaggcaatcggcagcaggaaatagacccaaaatatcagcataatgatgggaatagcgcggaaaaacccgagaaatgccgcaaacaggtttacccaccagccacgcagcattgccagcatcactccgccgatagtcccgagcaccacggaaatggccccggcaatcaggctgatcaccagcgtcagtgccgcaccctcaagcggaccgtccgggaaagtgccgaacaacagatattcccagttatcacgaattacggaaaagtccatcttaatgcccctgtgccagtgcccgttgtgtccgccactgcccgaaggcttccattacggcaataatggcgatatagaggatcgtcgcgactccgaaggcttcaaaggtttgtaaggactgactttccacctgacgcgatgcataagagagttcagccacaccgatcgccatagtcagggacgagtttttcaccacattcatatactgcccgagcagcggcggcatggcgattctgaccgcctgcggcagcaccacatagcgcatggactgccacggagtcagcccgagcgccagtgcggctgatttttgctgccgtccgataccggcaattcccgcccgtagttcttccgcaatgaacggcgcagaatagagtgtcagcccgaaccacccggcgataaattcaaatgacggccatgcgagtgtcagcccggccagttcaatttcatgcggcgtgttcagccagattttcagcgcctgcggcaggatttctccagaggcgaaataccagaaaaacagctgtaccagcagcggcgtattacggaatacactggtgtaagcactgactaaccagcggagcggtgcgagctggctgtcccgcccggccaccagcaggaaacccagcaatgtcgccgcgagaatcgtccagaatgagataagcagggtgatcacaaacccctgccccagccatcccagatattccggcgcaagtaagtgcgcacttataaattgctcaaacatccgctaatcccgtctgttaccgcacaaatgcaggaagcctcaccggagtgaggcctgattcagaaaacacactcacgttatttcggctggtcagccagcggagcaaacttaaattcaccgcgcggttgttcggctttggtgcccggaccaaaccactggttataaatctgctgtgatttgccctcactttcgagtttcagcagggttttgttcactgcttccaccagacgggtttctcctttcggtgctgccagcgcctggtattcacgggtcagactgaacggagagagttcaaactccgcttttactgactccggcaggttaccgagcaacccgaccagtttggcatcatcctgtgtgatagcatcgacgttaccattgcgcagtgctgcgaaggccagcggggtatcatcataagaaatcactttggtgcccggatatttctcgcgcagcgtcacttcctgaacggtacctttatccgcgccgatgcgcagttttgccacatcttccggggttttcagcacacctttgcgggcaataaatttttgtccggtctgaaaatcaggaatggagaaatccacctgtttggcgcgctcaccggtaatggtgaaattcgccccgattaaatccactttgccggagaccagcagcggaatgcggtttgccgggttagtcggacgcagttccagcttcacgccgagatcatcggcaacagcctgtgcaatatccacgtcataacctgccagttttttggtctgcgggtcgataaatccgaacggcgggttgctgtcaaaaaccgaaatgcggatcacgccggctttctgaatatcatcaagcttatcagcctgtgctgtaccacttactaatgctaaaccggcaagcagagccggaacaaataatgtcggtttcatacacccccctggaatcagtcacggaaaacgtcaatttgtgtaaatcaccatctcacgctatcaactcctgcttagttcctgaaatactaagaaagaataattccataactgattgttctaagatgaatacaagaacagagccactctcctcaataacaagctattatctttaatttatccatttttattaaaaaaattaattacattacttatgattatttatcgaaataaaatcatacgttattttttctacggaaatattcactgaccatgataagagatactaaacgctccatacagctgttaattaaaattaatatctaaaagaaattacttatcagaaaaccgttaataaacaatcacatcttattatttgtatatttatctttccattaccaccaaaataaaaaatgaatacgaacttataaaaaatacaagttctgaaaatgaaaatttataaaccttgacaataatcacatatctgtaaatttaaaaattaagaactggtaaatatccctaatgattatagatttaaagagactgattcttattagtctctttaaatgaaaatccgcaaaaatagcctcttatttttgtcagtctggtatcttatttttaccggagttaaccatgttaaagaaaacgcttattacggcattagtttctgccgcctttttttcaggctcagcgtctgcggtcactgctgcgggcgggattataaacatcacaggtgctatcagtgacaccacctgtactattaacggaggcaacagcgccgacttcgccgtattattagatccgattacagtaacggatgccggggtaaccgcaaataccgtcattaccaaaaatcagaaagcatttaccatgacattctctgattgtgcacctgcttcagtcccgcccggaagtaacctgaaaatacatttcgcgtcccccaacaatatatcgtcaaccggaaactacctgattaacgataccgttaatgaaggggatccgtctgtcgcgaaaaatgtcgggttcagtttatcgtcaacaaccgcaccgtcagtggcactttcactgaatgcggcgtatgacaccggagtgaagggagataaaaccgcaccagcatcggatcaggtgacattaattgccagttattacaaaaccaatacctctcctgcaaaagtcgggcctgtacattccaacgtgatttatacagtctcttatttataaccattgtcagacagtcaggcttgtcaaaaagcctgactgtttacaggggaatataatgaaacgccgattcttttttctgatgatgcttattttatcaggtaatgctaccgccaatatcgtgattaacggaacgcggcttatttatcatgaagaaaatgacagcattactgttcagctgaataataacagccagacatcatcattagcccagagctggacagatgacggtgacattaatgccacaccggaaaacagcagttccccgttttatgtttatccgccgattgtcaaaatagacggaatgcagggacagcagcttaaaataaagaaaaataatgaaaaactaccggatgaccgggaaagtgtcttttatctcagtgtgctggatattccggccacgcccgccaatgccaaaggaaaaagtgtgttacaggtggccctgcggtcacggataaagctgttttaccgcccagccgggctgacggcaaatccggaaacggttattgataatattcagtggaagctcaacggtgaccatttatccgtcactaataattccccgtatcattttaccattgcggcggtcaatgctaatgacagcagccacacctggctggccgcctccgaaatgattccgccattttctgaaaaacaattaccactgaaaaataaacccgcagcccgtaatgcctcagtgacctatgtggatgattacggtgtgtataagtcgaagaatattaccttctgacggacgataataacgtgaaaacacaacactgcctgccgattctgattattgccggattatggagctatccccgcgaaggcttcacggaagagttcgataccaccctgctggccggtgaatccgctaaaggggatatttcacgtttatatcaggaaaatacactgccgtccggcgatcaactgatggacgtttatgtcaataacacctggaaaggtcagtttaccgttgaagtaggggagcataataatgccctgaattttcagccggaagatattaataagctcgggctgaatctttctgatgacgcgaaaacattatccgcagagaaacagccggttccggcagatgatctgacttccggactgacttaccacctgaataaaagtacattacgtgttagatttgtccgtgccgcaaatcggggtaaagaccgccgatgccggttatattgatccggaattatgggatcacgggcagcccgccgttattctcggctataacgttaattactataacgccagacaaaaaaagaataacaaacagagcaatgacagcttttttgccacagtaaactccgggctgaacctcggtgtctggcaattccgcgatgaatcggtttacacctcttattccggcggacataaaggctggaaaaataacagccgttatctttaccgtccgatcagccgtattttatctgcgctgacgctgggggatttttatacgccgccttctatgttcggcagctttaaattcagaggcgcatcactgggaacggatatgaatatgctgccgccgtccggccagggattcgcaccaatcatccggggtgttgctcagaccaacgccctcgtcagtatttaccagaacggcaatcttatttttcaggaaaacgtaccgccgggtgagtttatgttccgtgatattcagccgaccggcggcagcggcgatttttccgtcattattcaggaagcagacggacggaaagaatcatttaccgtccccttctccgctgtacccgatatgctgaaagagggaatttataattacagtctgaccgccggtcaggcacgcctggataatacacactaccgcccggagtttgtgcagggggaattccgttacgggctgaataataccgtgacactgtataccggcgggattgccggaaaagattaccgctctcttttggcgggcagtgcctggaatctgccgttcggtgcgctttctgttgatgtgacacaggcggatgcggactttaaaaccggccgcaaaagcggccagagctaccgtatcgcctacagtaagtttgtcagcaccacctccaccaacctgactctcgcgacataccgctactccaccgggaatttttacagtttcaccgatgccatctatcagcaggataactaccgggcgtgggatgcttaccgtaatgagcaggaaaacctcaccgataacacgccgcgtcagataccggatctgatgacaatggatgccatgcgcggtgctcgcgctaaaaataccttcaccgtgaatttaaatcagtatctgggagagaaccggggggtgatttatatctccggcacacaccgggattactggaattccggcggcagcaaccgggaatatcagcttggatattcaaacagttataacgagatcagctataccgtgtctgcatcacgcacccgcaattttgatgataaaaatgaaacccggttttacctgaatgtcagcgtgccgatttctgttttcggtaaaagtgcatcactcagcagcggtatttacgccaccgattcccgttatcagcaggctactgtcagcctgagcggcacagccggtaaagatgatttggttaactacacgctgaccggctcaaaccagaacggcggcagtaatcttgcaggcgcaaaccttacttaccgtaacccgtacagcaccctgtccggctcattcagtgagggtaacgattaccgtcaggcgggcgccggggcaaaaggaactatcgtcgcgatcccgggccacatcgccatgtccggtgacaccggcaatacctataccattattgatgccccgcaggccggtaaccggatggtgaattcggataaagcatccctgacaaacagtgatggtgtggtgctgatgacacaatctgttccttaccgcgccaattcttacactctgtcagacacagaaaaaagttccggtgccgaagtgaccggtaatatcggccaggtcagcccgtataaaggtgcggtcagttatatccgcatggaaaccgatccccgtcagactttcattctgcgggcggcgcgggaaaacggcagcacactgccgttcggcacagaagtgactgatgagcagcatcagccgctgggatatgtcgggcagtcagggctgctctatctgaaaagcgggcagttgccgtcatcactgatcataaaactgacggcagacgggaaacagcagtgtgttatccgcaatccggtggtcacaccggataaaaatcacaatatctgccggtaaaaggaaacaatgatgaaaacatccgccgctgtattacttttattcctgacggtgataagcagcagggcggcttatgccacctgctcggtaacatccacccagacagcaccggccgtggcgctggatctttcggctgatctgatcggcgccaccacaaccgtatccaaagtatctcagaccaacttcagcggcccgtttacctgtacgacagcattgccgctgtttccgaataccatcgggatcgactctccctttaatggccggacagcgacaatcgggtttaataacggcgcacaactcgtcaatatcaccctgaccgcactgacaaaaaataatgtttccggcctggcggccggtactcacaacggaacagaactcaataccggtttcacactgcgttttgatctggtcaccacgccgaccggcaactacaccaaagttccgggtaatactgtgacgatcacaccggtcatttttgcctctgatgccaccaccctggggctggtgggctggctggcggcacttctcaataagattttgcagtttttactgacactgcaatggccgtccgatccgaatgatatgtttttgcagccggtgcagattacttacaatccgccggtgaccacctgtacctttaccaatgccgggctgaccgtcagcctgccgctgatgagtatcaatgccgttaaaaccacggataaagccggatacaccccgttccgcctcaattttacctgtggcggcctcctcccgggtaacaccgcgtcccgggatattgccatgttcctgtcgtcgtccaatttacagccgtccgataaaaccgtgctgaccaataccatttccggcggtgccggtggtgtcggcttccgggtggtgaaagccaataatctcagcagtccggtacagttttctgacagtgccaatgctcagggcagtgccaccagcattttcactgccgccaaaggcagcgcggtttcaccagcgttctctgtcgatctcggcgcgtattattatccctacaatccgactgcggtaacacagggaaaaataagcagttccgcgactctggttttttcctacaactgaaccggtggaggacatgatgcggacaggcattctgatcattctgctcctgtgcatacaggtgggatacgctggtgttgtcatcaataccacgcgggtgatttttccgggtaatcaggaaaatacagaaatccagctgaccaacagcggggacatgccgtcactggtgcagagctgggtggatgagggggatatcaattcctcgccggaaaccagcagtgcaccctttatggtggtaccgccggtgacgcggattgcagggagcggcggacaacagctgaaaatccgtgttctgaaaaataatcttccccgcgaccgggaatcggttttttatctcaatgtggtggatattccggcgaagacggccaccaccggtaataccctgcaatttgccctgcggacacggataaagctgttttaccggccggatgatcttttgcagccgccggatgcagtcccggaacagatttcagcctcgttatcaggagaaacactgattctgaaaaaccccacgccttactatttcacattatccgcgctcgtctccggcggagataatgcgccgtcacatatcagcaccgtgatgctcgccccttattcagagagccgggtggcatacaccgggcatttatctgcgggagagtccgtcacgctgatcagcattaatgataaagggcgcaatgtgcggacagagaaaaagctgaactgagaatgccggtcaggtaatgaccggcttttgcattacgggttgagtgcattaccgcaccggccgcagaagcggctgtccgacgggtaaccggtaccgcacttctgacaatatccgctgatattctgcggagtattgttgtttaacagctccggataaccattattgtcacggccatgcttattgtaacccgtattaccatgtttgctgccatgaccgctgctgccgtggccgccgctgcggttcccgtgaccggatccgcctccgctgttaaaaaaccggctgaataaacccatcgtacacctccggaaacactgttttgtctgtttcagaaagtataaaccccggagttaactccagggtcaaatcagaacagggacttttacaaaaacagacaatatcgccggagaaaccacccggttatgccggatcattccctttttcgccgttattactgtgtgcggagacttcaatcacatgctcgccgagcaggatacgttccacatcatcccctttcacatgacggaaatcctgtcccttcacataatagaagataaattcgcagatattctggcagcgatcaccgatacgctcgatagagcgggcacagaacagcgcggtcaggacactcgggatagtgcgcggatcttccatcatataggtcatcagctgacggacaatcccttcatattcctgatccactttctggtcttcgcggtagatgcggatagcttcctgaatatccatacgcgcaaaggcatccagcacatcatgcagcatctgaatggcatggcggccgagggattccagactgaccagcaacggctgatgctgctgtgaaaatttttccagcgcggttttggcaattttatccgccacatccccgatccgttccagttcggcgatggttttggaaatcgccataatcaggcgcaggtcgctcgcggtcggctggcgtttggcaataatgcggacacaggcttcatcaatcatcacttccatgatgttgacctgcttgtcaccagcgataacctcacgcgccaggtcttcgtcctggttatgcatggcggtgatcgctttgctgagctgctcttccaccagcccgcccattgtcatcatttctgtgcggatatgctctaattcagcattaaactgcccggaaatatgtttattgtgattcagattttccatgattgtctccgcatcagccataacgaccggtgatgtaatcttcggtttgtttcttgcccggggtggtaaacagagtatcagtatcactgaattcaattagttcgcccagatacataaatgcagtgtggtcagaacagcgcgccgcctgctgcatgttatgcgtgacgatcaccacggtgtattccgatttcagctcgctgataagctcttcaatacgcccggtggagataggatccagtgccgagcacggctcatccagcaggagaacctcagggcggatagcaataccgcgggcaatacacagacgctgctgctgaccgccggagaggctgtagccgctctgatgcagtttatctttggtttcgttccacagtgccgctttggtcagtgcccactgtacccgctcatccatctcggcgcgcggcagtttttcaaacagacggacaccaaaggcaatattgtcataaatagacatcgggaacggtgttggtttctggaacaccatgccgactttggcgcgtaataacgcgatatcctgggtatcggtcagaatattggtgccatccagcaggatttcgccttccgcacgctgttcattatacagtgcgtacattttgttgaaggtacgcagcagggtcgatttcccgcaaccggacgggccgataaaggccgtgactttatttttggcgatatccagcgaaatgtttttcagcgcgtggaactggccgtaatagaagttcagatcacgaacctgaattttgctttcagttacgttttgaattttactcatgactctctctcattcatccgcagtcatttaatcagtgctttttcttcgcaaacagcacacgcgccacgatattaattaacagcacacacagtgtgatcagcaggacacccgcccaggccagactctgccactccgcaaacggactcatggcaaacttgaagatagtgaccggcaggttggcaatcggctgcatcagatccgtactccagaactggttggagagggaggtaaagagcagcggcgccgtttccccggcaatacgggcaatcgccagcagcaccccggtgataatcccggagaccgaggctttcagggtaatcgctgaaatcattttccattttggtgtgccgagggcatacgccgcttcgcgcaggctgtccggcaccagacgcagcatgttttccgtggtacggataacaatcgggatctgtaacagtgccagggcaatcacccccgcccagccggagaagtgctgcatctgcatcaccacgatggtgtaaacaaacagtccgaccacaatcgacggtgcggataacaaaatgtcattaataaaccgggtgacttccgccagccaggatttacggccgtattccgccagataaatcccggcaagaatacccagcggtgtcccgataacggtcgcccataagatcagcaggccggaaccgacaatggcgttcgccagacccccgccttcggtattcggcggcggtgtcatttcggtgaacagcgccagcgacatgccgtccatccctttggtgacggtcgagaacaggatccagattaaccagaacagcccgaatgccatcgtggacatggataaaaacagggcaacgcggtttttctgacggcgccagaactggcgtttctgccgtgcgctgatatccacttttggttgttgaatattcatttcagccatctcagcgcccctctttcttattcagacgcatcaccataaatttggagatagcaaggacgataaaggtgatgacaaacagaatcagccccagctccatcagtgccgcagtgtgcagcccggattccgcttccgcgaactcgtttgccagcgccgaggtaatactgttgcccggcatatacagcgagaagctgtccagctgataggtgttaccgatgataaaggtcaccgccatggtctcccccagggcacgacccagacccagcatcacgccgccgatcaccccgttcttggtgtacggcagtacaatccgccagatcacctcccaggtggtacagccgatgccgtaagccgattctttcatcatcaccggcgtctgctcgaacacatcgcgcatcaccgaggcaatatacggaatgatcatgatggcgaggataacgcccgccgccaggatcccgatcccgaaggccggaccggagaacagctcgccgacaatcgggatgctcgacatcacctcgccgaccggctgctggaaataggtggcaaacagcggggcaaagacaaacagtccccacatgccgtaaacgatactcggaatagcggctaacagctcgatcgcgatacccagtggacggcgcagccagttcggtgccagttctgtcaggaacagcgcaatcccgaaactcaccgggaccgcaatcagcagggcgataaccgaggtcacgatggtgccgtaaatcggtaccagtgccccgtactcttccgccggcgggttccactctttattccataagaaacctaagccgaatttttcaatgctcggccatgacgcaataatcagtgaaataataattccgccaagtaacaatagcgtaatcagcgctgccagttttaccagagcactgaaaagttggtcgccgcgtttgcctggtggtttcattgccgttttcagttcggccatagtcgcttccgtttttacacagatccccccggtgcggggggatcaattactgataaatcgttacttcatcatctgccgtatcagtacagcggcttaccgctgctgtctttgacactggttttccatgatgcacggacctgttcaatcacttctttcggcagtaccgcgtaatccagtttttctgcctgctcaccgccgttcttgtatgcccagtcaaagaatttcagaacttcctgacctttggcagcatctttctgattggtatgaaccaggatgaaggtggtggaagtaatcggccatgcattcggacccggctggttagtcagatcctgagcgaagctttttgaccactcggctttacgtgctgcgttactgaagctttcgccggtcggggataccgcatcaccgtccgcagaaatcagtttggtgtaagccagtttattctgtttggcgtaggcgtattccacgtaaccgatagagcccggcagacgctgaacgaatgctgcgataccgtcgttgcctttaccgcccagaccaaccggccagttaacggtagaacctgcaccgacctgctctttccagtcagggctgacttttgacaggtagctggtgaagacgaaagaggtaccggaaccatccgcacggcggacaaccgcgatatcctgatccggcagcttaactgacgggttcagtttggtgatcgctgggtcattccattttttgattttacccaggtagatatcacccagggttttgccgtcgagcaccagttcaccggacttcagacccggcaggttgacggccagtaccacaccgccgatcacggtcgggaactggaataaattatctgcggccagtttatcttcggacagcggcgcatctgacgccccgaaatcaacggtattggccacaatctgcttcacaccgccggaggaaccaatcccctggtagttaactttgttaccggtttctttctggtaagtatcagcccattgcgcatacaccggcgcagggaatgttgcacccgccccggtcagactggtcgcggcaaatgcagaaaatgcagagagagaaagtgtcgctgccataacagtggctactgcggtacgcatcggtttcatgatccctcctgacgggatttatagataatgacgataaacgttgtatctggttaatgtcggaacatgagggaaaataggacaatctggtgacaataatatgtaggttatatgacagttttatgacattgcaggtgcgcggggacacaaaaccggaaaaatgacggggaaacacaaaaacgaggcaaggctgtaattttatgattttattgatattaaaagtaaaacccctgcgataattgcttaccgcaggggtttatgacagtcatatgacgatgacatgctgctgtcataataattaatcatctctgtcatccggcagcggcagcatcacgcggatacggaatccgccgcgctgactgcggccgacatcaattttgccgtcatgcgcatccacaatccggcgcagaattgccagccccagcccggtacctttattactgcgtgctttttcaccctgcacaaacggctggaacagatccggaatatccgcctcgtcaataccgttgccgtcatcttccacctggaaccaggcgaaatgctcatcactgccgctgctgacacggatccagccgttgccgtagcgggtggcattgaccagcatattgcccagtgcgcgtttaatcgcaatcgggttaccggtgagataaaccggggcctgaataacatcattctgaatcgtcacatccgagtggatgtgcgcttcaatcacctcattgaggacagatgtcagttccagatgcaccatctccatctcacggccggtgcgcagatacgccataaactgctcaatgataccgtcacactcttcaatatcattgttgatggattccgccagataatcgtcatccgggttcatcatttccgttgccaggcggatgcgggtcagcggcgtgcgcagatcatggctgacaccggccatcagcacggtgcgatcctgctccagagttttgatatctctggacatctggttaaacgagcggataaccgagcgcacttctgccgccccggcttcccgtaccggaaccagcggaccgccggtaccgatttgccgggctgcggattccagctcggtcagcggacggttctgatagcggataaacacccagacacctgcaaagacaatcagcagaaaggcaaaaatataacggaagaccggcgagaactgatcctgaccgatttcagtcagcggcactctcacccagacatccggggcaatataggagttcagccacagcacgggataatcgcggctgacttccagccggacatccgcataaccgtccagataatggctcatctgtttactgagggattcaaaatgacgcgcccagcgcagtccgccctcatcggctgtcttttcggtaaaaaaggtaatgcccagctcttcataaattttcttacgcagcgccggagaaacacgtaccgcggttccgtccttcagcaccatctcttcgctcatcagtgtgcgtacttcataggccagcacccggttaaactgctgcaggctgggcatcacaatgaagttcacaacggccagataacttgttgttatggttgcaaacaacagaaagatgaccagaaataacgagcgcgaaaaggtgctcctcggcgagaaccgcagccgcttcatgccttgttgccgtccggaacgaacacgtaacccagtccccagacggtctggatataacgcggatgtgtcggatcttcctcaatcatgcggcgcagacgggaaatctgcacgtcgattgaacgttccatcgcactgtactcacggccgcgcgccaggctcatcagcttatcgcgggacagcggttcacgcgggtgtgacaccagcactttcagcacggcgaactcaccgctggtcagcggcatgttttcatcttcatggaacatctcacgggtgccgaggttcagtttgaacttaccgaactgaatcaccgcatcatcctgggatggtgcacccggcagttcattcgcctgacggcgcagcacagcacggatacgcgccagcagttcacgcgggttaaacggcttcggaatataatcatccgcaccgatttccagcccgacgatgcgatccacttcttcccctttcgccgtcaccataatgatcggaatcgggttattctggcttctcagacggcggcagatagacagcccgtcttcgcccggtaacatcagatccaggacaataagatggatagattcacgcgtcagcaggcgatccatctgttccgcattcgcggcggtacggacctggaaaccctgctcactcagatagcgctcaagcagcgcacgcagacgcatgtcatcatcaacgacaaggaccttataactttcctgcatgtttgactcccgggttcattttttcatgcaactcttcagattaattgtgcctattcagcaatcggctgatagcggatagacaaaatgacataattcacttcaccgttaggtgttattaccgttacttcatcatccgcctgttttccgattaatgcccgggccacaggggaatcaacagaaatccatttctttgccggggaaaattcatcgggtccgacgatgcgaaaagtctgaatttcttcatcatcattttccagttccacccacgccccgaaaaatacttttccttcctggcggggatccggctcgactatctttaagttatccagacgttttgaaagaaaccggacgcgtctgtctatttcacgcagacgtttctttccgtatatatactcggcattttccgagcgatccccctgtgcagcggcttctgacactgcctgagtgacctgcggacgttctgttttccagagatattttaactcctgatccagcgcatcccatccttcacgggtaatcaggttactttttgccatatgttacctaaacaaaaaataaattatttaaataaattgtaatactaaatgcattttctgaaagataacagctatgcataattcatttatattactttatatcggctggtaattcccgttttgaacacgtataactgtcccctgaaatttttttacgtcaatttatcgcagccggaaagaatatcatgatgaatgaatctctgagccagattattgccggtgaactgaatgcgcaaacccgccaggtcaccgccgcgattaccctgctggatgagggaaatactgtcccttttatcgcccgctaccggaaagaagtcaccggcggcctggatgatactcagctgcgtcagctggaaacccgtctcagctacctgcgcgaactgaacgaccgccgccgggccatcctcaaatccattgaggaacagggcaaactgacccctgaactggcgggggcgattaacggcacgctcagcaaaacagagctggaagacctctacctgccttacaaacccaagcgccgcacacgcggacagattgcggcggaagccggtctggaaccgctggcagacactctgtggcaggatccgtcacaggatccggaaatcctcgccgccacctatgtggacagcgaaaaaggggttgccgacaccaaagccgccctcgacggcgcccgctacatcctgatggagcgtttcgcggaagatgccggtctgctggggaaagtccgtgattatctgtggcgcaatgcgcatctggtttccgttgtgatcagcggaaaagaggcggaaggcgcaaaattcagtgattatttcgatcaccatgaaccgattgccaatgtcccgtcacaccgcgctctggcgatgttccgtggtcgcaatgaaggcattctgcaactctccctcaatgccgacccgcagtgtgaggagccgccgaaagagagctattgcgaagagttaatccgcgattatctcggcttccgctttaacaatgctccggcggacagctggcgcaaagcggtggtgagctggacatggcgggtcaaggtgctgctgcacctggaaaccgagttaatggccgcgctgcgcgagaaagcagaagatgaggcaattaatgtcttcgcccgcaacctcagtgatctgctgatggcggcaccggccgggatgcgcgccacaatggggctggatccgggtctgcgtaccggggtgaaagtcgcggtggtcgatgccaccggtaaagtgctggccaccgacaccatttatccgcacaccggccagactgccaaagcagcggcatccgtcgcggcgctctgcctgaaataccatgtggaactggtggcgatcggtaacgggacagcatcccgtgaaactgaacgtttctttgccgatgtgcagaagcagttcccggatatcaaagcccagaaagtgattgtcagtgaagccggtgcctccgtttactctgcgtcagaactggcagcggcagaattcccggacctggatgtatcactgcgcggtgccgtttctatcgcccgccggttacaggatccgctggccgaactggtgaaaatcgacccgaaatccatcggggtcggccagtatcagcatgatgtcagccagacacaacttgcccgtaaactggatgcggtagtggaagactgcgtaaacgccgtcggcgttgacctcaacaccgcatctgtcgccctgctgacccgcgttgccgggctgagcaaagtgatcgcacagaatattgttgactggcgtgatgaaaacggccgttttgctgaccgcaagcagctgctgaaagtcgcgcgtctcggcccgaaagcctttgagcagtgcgccgggttcctgcgtattgccggcggtaaaaatgcgctggatgcctccaccgttcacccggaagcctatccggtggtggaaaaaatcctgcaggccacacagaaaaccctcagtgatctgatgggtaacagtgatgtgctgcgcaatctgaaagcacaggattttgtcactgaacaattcggtgtgccgaccgtttccgacatcctcaaagaactgcaaaaacccggtcgtgacccgcgtccggagtttaaaaccgccacctttgccgatggcattgaaaccatgaatgatttgcgtccgggcatggttatggaaggcgcggtcaccaacgtcaccaatttcggtgcttttgtggatatcggtgttcatcaggacggactggtgcatatctcctcgctggccaaccgctatgtggaagatccgcataccgtggtcaaagccggggatatcgtcagtgtcaaagtgctggatgtggatatcgcccgtaagcgtatcgcgctgaccatgcggatggatgaggagccggaaacggcagcccgccgcggtggcggcggcagcgataaaccacgggcggaaaagcgtcagaacaaccgccctgcccgtaacggtaataatgacacctctgccggtaacagtgcgatgggtgatgccctcgccgcggcattcggtaagcgtaagtaattcccctgctatcatgtacgcggcagccccggctgcccgtacatttccctcctgttagtcacatattgcgttaattagtcgtaaaaattgttattaacgtaaatcaatacgtgaaatatctgctctcaattgttttatacgccggatatcttgatgcacatcaaactttgctggttaattttcgggctaaataggtaaaatattgttggttatgatttgcatttacagtatcaattaaatttgtaagggatatttttctgccaaactgttcgtgcaataatcatttgcaatatcattcctgtttgcatggttaaccggagcctttatgacacttcagccacaacacagttataaaattctgggcttttccgggcaaatcagcccggcataccgtcagaaattattgtctctgggcatgctgcccggctctgttttccgggtgatccgcagcgcaccgctgggcgatccgatccaaatcgaaacccggcacgtcaacctgatgctcagaaaaaaagacctggcgctgctgatgcttgatgacgtgcaggcgtaatccgccgcacatcccgcgctgactcactcttttccctctgccgccggcagaggggtttgtatttattgattggcatacgacactatgaaagcactcaccctgggactcatcggtaatcccaattcagggaagaccacgctgtttaaccagttaaccggatccaaacaacgcgtcggcaactgggccggtgtaactgtggaacggaaaatcggttatttcaccacgccggaacacaagattgagctggtggatttacccggcacctattcactgaccaccatctctgaacaaacatccttagacgaacagattgcctgccactttatcctcagcggtgaagcggacatgctgattaacgttgtcgacgcatccaatctcgagcgtaacctgtatctgacgctgcagctgctggaactgggtgttccctgcattattgccctcaatatgctggatatcgccgataaagcgaatatcaatattgatgtcaaagcgctgtcagaacgcctcggctgcccggtgatcccactggtttccacccgcgcgtccggtatctgtgagctgaaagccgcgatcgacaaacacacaatgacacctcatgaagtgctggtgaactatccggctgcgctgctcgacagcatgaacactctcgcacagtcgattcctgcggaagagttcagcgccacacagcgccgctggctggcactgcaaagcctggagggggatatctacagccaggcacgcgccggtttcaccccggagcatgtgcagtctgtccgtgacgcgatgcaggcacagcagcaggaagagccggaactggtgattgcggatgcccgttaccagaccatcgcggatatctgcgaaacaaccattgataacagccattccgagccgaataaactgaccgcagcgatggacagaattgtcctcaaccgctggctgggcgtgccggtattcctgtttgtgatgtatctgatgttcgtgctcgccatcaatatcggcggggcattgcagccgctgtttgaaggcggttcggaagccattttcattaacggcacacaatggctggggatgacgctcggcttcccggactggctgaccattttcctcgcccagggggtcggcggcggtatcaacaccgtgctgccgctggtaccgcaaatcgggatgatgtacctgttcctctctttcctggaagattccggttatatggcccgcgcggcatttgtgatggacagactgatgcaggcactcggactgccgggtaaatccttcgtgccgctgattgtcggtttcggctgtaacgtgccgtccattatgggtgccagaaccctggatgcaccgcgtgaacgtcttatcaccgtcctgatggcaccgtttatgtcctgcggcgcgcggctggctatcttcgcggttttcgcggctgccttcttcggcaaaaacggcgcgagcatcgtgttctccctgtatatcctcgggattgtggtggctatccttaccggtctgctgctcaaacacactattatgcgcggcgaagcatcaccgtttgtgatggaactgccggtgtaccacgtaccgcatatgaaaaccctgtttatgcagacctggcagcgcctgaaaggctttgtggtgcgtgcgggtaaagtcattattgtcgccagtatggtaatcggcgcactgaacagcttcagtttctccggtaaaccggcggacagcattaatgattccgcactggcctcagtcagtaaagtggtcactccgctgctcagcccgattggtgtcaccaatgataactggcaggcgactgtcggcctgatcaccggtgcgatggcaaaagaagttgtggtcgggacactgaataccctctacaccgctgaaagtatcaccaacgaaccgtttgatccggaatcctttgatttatgggatgaactgggtgatgcggtaaatgaaaccctggattccctggcggaaaccttcacgctcgcggcattatccaacccgattgaagccagcaaaggcgacggcgagatggacggcggtaccatgggcaccatggccgcgaaattcggctctgatgttgctgcttacagctatctgatctttgtgctgctgtatgtgccgtgtgtctctgtgatgggggctatcgcccgtgaaaccagccgcggctggatgaccttctccatcctgtggggtctgaacgtggcttactcactggccgccctgttctaccaggccgccacattcagtacccatccggggagcagttcagtgattatcgctgtagtggtgattttcaacctgatcctgtttgcactgctgcgccgcacacgcagccgggtgaatctcagcttccgccgtgatgcacacagccgctgtggcggctgctccggcaacgagtgtcactgataaaaggacacggacatgattagcctgatcgcagtacgtgacgccattgcactgaacggccgggcagatgcccggctgctcagccaccagttgaatgccccggaagccctggtgcaggccatcatggaaaagctggctgccatgggaaaaattgaagcggtggatgtcagcagctgtctgagcagcagctgcaaacagtgccctgaaagtcagggctgtgacacaaaggtgtatcagattcattcataaaacttacccgccgttgtgcgggtatttttttatttaacaaactccgtcagtacctcacaaaactcatccggatgtgaaataaacggtgcgtgagcgctgttacgcataataacggatggagaggacggcagttgctcatccagcagtgacgcgactttacgcggcaccaggccatcgagataaccatagatccgcaggaacggcattgtcagggacggcagtccgctgcgcagatcggcggttctcagaatctccagcccggcattcagtactgacacacccggcatcggctgtcccagtaccactgatttcagtgtacgggcatcctgacgggcacttgcggttcccagtgtctgcagtgccagaaaacgctcaacagtacgctgaaaatcggtcgccagctgatgctgaaagccgctcagcaccgtcggtttgatccccggccagccttcctcttcctgtgcaccaaaatacggcgatgaacagattgtcaccagatggctcactgcctgcgggtaacgcagtgcaatatccgcagccaccagcccgcccagtgaccagcctgccagcaccgcattttccggcatctgcgcgaaaacagtatccgacatctccgtcagtgacatttcaccaaattcctgactgcgcccgtaacccggtaaatcaaccttgtgaatacggaaatgcggtgcgagccgcaattcaatgctgttccatacttcgctgttcagtccccagccgtgtaacagcacaagatcgcgcgaaccctgtccgctctgctgccaaaaaagcgttgccatcgttattgtttccttatttatccggagggaagacggatggttattattgagaattactgcctgctgtgcaatcagccgctggcaattgccgcacacggtatctgcggattctgcgaacggggactgccggagatgccgccggtctgccgtcgctgcggcctgccgctggtgacaccggagccggaatgcggccgctgtctgcaatccccgccgccgtggcagagcctgctggccgtaaccggctatcagccgccgctggccgccctggttcaccgcctcaaatacagcgggcagacacacattgcccgtgcactggcacggctgctgctgcgccgggtgctggcagcttaccgcgccggggaatgtccgaagccggatctgctgctcagcgtcccgctttaccgttaccggcaatagcggcgcgggtttaatcagagtgatcttatcacccgtccgctggcaaaatggctgcgctgcccttatgacagttccggccttatccgcacccgtgctacactgagccagcggatgctgtcccgcacgcagcgcctgacaaacctgtcctctgcgtttgccgtcacccgtaatgtccgcggactgcatattgcgctgaccgatgatgtcatcacaacaggggcgaccatgacagcgctgtctgaattgctcattcgtgcgggcgcggcggcagtccgggtgtggtgcctttgccgcaccttgtagtgaacccgcaaatgggcgtattataaccaaccggaacagtcaactatttttgggcaatgttatgattactattactgacgctgcgcaggcacatttttccaaactgcttgccaaccaggaacccggcacacaaatccgtgtttttgttattaacccgggcactcccaacgcggaatgcggagtctcttattgtccgcctgatgctgtggaagcgaccgataccgcgctgccgtttgagcagctgaccgcctatgttgatgaactgagcgcaccgttccttgacgaagccgtgatcgacttcgtgaccgatcagctcggctctcagctcaccttaaaagccccgaacgccaaaatgcgtaaagtggcggatgatgccccgctgatcgagcgtgtcgagtacgttctgcaatctcagatcaacccgcagctggccgggcacggcggccgtgtttccctgatggaaatcacggacgaaggctatgccatcctccagttcggcggcggctgtaacggctgctccatggtggatgtcaccctgaaagaagggatcgaaaaagagttactgaatatgtttgccggtgaactgaaaggcgttaaagacctgactgaacatcagcgcggcgaacactcttattactgatagtgctgtaccggccggatatcgcacggccgtgataatacactgcccggttatccgccgggcaggtttccggtggtgctctgtcaccgctgatattcacctgcatacgaaaaatcattatggaacaaatccgcttaatcacaccggatacggcgtatgaactctggcagcagaacggggctgtcctggttgatatccgtgatccgcaaagcttccgtgccggtcatactgacggcgcatttcacctgacaaacgacaccgtgaataccttcatggatcagacagattatgagcagccggttatggtcatgtgttaccatgggcacagcagtcagggcgcggctcagtatctgcttaatgtcggctatgaaacggtatacagcatcaacggcggctttgaggcctggttgcgcaattacccggacacagtcaggtcacttgcttaacaacggacagctatatggtttatctgatcaccatcgccaacccgcggattgcccagtcatttattgattatatggccgcccgggatattgagctcactatgcgtgccacccgcgaagggcgcggcgcggaattgtggctcgacgacgaaagcaaactggcacagacacaggctgagctggaaacctttatgcgtgatccgatgaataaacgctatctcgctgccagctgggaatccggtgaaaccgattccccgttccgctacccggcctctcatgccttcagtaacctggtgaccccggccgggccgctgaccatcaccattaccgtactgtgcgcactggtttttctgtggatgcagataagcggcactgacgcggtgatggactatctggcctggccgcagcctgaccagcagggtgaactgtggcggtggataagcccggtgttcctgcatttcggcctgacccatattctgatgaacctggcgctgtggtggtatctcggcggtcaggtggaaaaacagctcggcagcggacggctgctggtgatcaccctgatttctgccctggtcagttgctggtcgcaatcctttttcagcggctcatccttcggcggcctgtccggcgtggttttcgcgctgatcgcttatgtctggtacaccggcgcgcgcaatccgtccgccggtatttatctgcccgccgccatgatggtattttcggtattatggctggttatcggttactttgatttatttggtacaatgccgattgcaaacatggcccatgcatccggtctcgcgaccggcctgctgatggcggtatgggataaccgccgccggacggcctgaataataatgaaaatatgacatcaccgccgcatatcacggcacagccctgaatatgcgcggtactgatctgaccgggggattttgtgaaacaaacacagcgtcatgatgctatcgttgagttagtcagtaaacagggctatgtcagcacagaagagctggtcgagcactttaaggtcagtccgcagaccatccgccgtgatctcaatgagctggcggagcagaataaaatccatcgtcaccacggcggggcggcacagccgtccagctcggtgaatgccgcctatcatgagcgtaaaagcatgtggtcggatgaaaaacgccggattgcccgccgtgtcgcggcgctgatcccggacggtgccacactctttatcgatatcggcaccacaccggaagcggtcgcgcatgaactgctggaacacaaaaatctgcgcatcgtcaccaataacctcaatgtcgccactctgctgatggcgaaagatgatttccggctgatcctggccggtggtgaagtccgttcccgtgacggcggaattgtcggtgaggccacgctcgattttatctctcagttccgtctggatttcgggattctcgggatcagcggcattgatactgacggctccctgctggaatttgattatcacgaagtccgcaccaaacgggcgattattgaaaactcccgctgtgtgatgctcgtgaccgaccactccaaattcggccgcaacgccatggtcaacctcggtaatatggggctgatcgattgcctgtttaccgacaaacgcccgccggaaagcattatcaaaatcctggacgaacaacaggtgcagctcgaagtctgctgattatctctgcccgtgccaccgcccggtggcgcggttttcctcccttttccctctgccgtaattcattattctttgtatggatatgctaacgaattgttatccatgtcacggagaacgtttttttatgtcctgaatgttggaatatcgttcacattgcactatcatgagcgataacgaacattaaagaacaaatatggtcatgcgggagtgaggatggaaacgaaagatttgatcgttatcgggggcggaatcaacggtgcaggtattgccgctgatgccgccggacgcgggctgtctgtgctgatgctggaagcacgggatctcgcctgtgccacctcatcagccagctcaaaactgatccacggcggattgcgctatctcgaacattatgagtttcgtttggtgagcgaagcactggctgaacgcgaagtattattaaaaatggcgccgcatatcgccttcccgatgcgtttccgtctgccgcatcagccgcatctgcgcccggcgtggatgatccgcgcggggctgtttctgtatgaccatctcggtaaacgcaccacactgccgggcagccgcggcctgaccttcagtactgcctccccgctgaaagcagagtttaaaaaaggctttgaatattccgactgctgggtggacgatgcccgcctggtggtgctgaatgcacaggaagtcgtgcggcagggcggcgaagtccgcacacggacaaaagtcacccgcgcatggcgcgaaaacggtttatggcaggtggaagcggaaaatgccctgaccggcgaaaccctgcgctggcaggcaaaagggctggtcaacgccgccggaccgtgggtgaaaaccttctttgatgacggattacagctcaaatccccttatggtatccgtcttatcaaaggcagccatattgtggtaccgcgcgctcacgacgagccgcaggcctatatcctgcaaaatgaagatcaccgcattgtgtttgtcattccgtggatggatgaattttcgattatcggcacgaccgatgtggaatatcacggcgatccggcagacgttaaaatcgatgataacgaaattaattatctgctggatgtgtataacgaccacttccgcaaaaccctgacccgcgatgatatccgctggacatactccggtgtgcgtccgctgtgtgatgatgaatcggactcgccacaggcaatcacccgcgattacacgcttgatttgcatgatgacaacggacaggcgccgctgttgtccgtcttcggcggcaaactcaccacttaccgcaagctgggcgaacacgcgctggataaactggcggcctactatccgcacgccgggaaagcatggacaaaacaggcggtactgaccggcggtgaactgaacggccggagccgtgacgattatgcccgggtgctgacagaacgctggtcctggctgccgaacggactggcgctgcgcctggcccgcacctacggcagtcagacagaaaaaattatcggtactgcgcaatccctcagcgacctcgggcagttattcggccataacctgtatgaatccgagctgcgctatctggtacagcacgagtgggtgatcaccgcagaagatgcgctctggcgcagaaccaaactgggaatgtggctcacacaggaagagcagctgcaggtggagcagtggctccgccgggaagagcaataacggaaacgaaacagaccggctcaaaaagccggtcttttttttatcgcctcagcgccgggattccagcgccatccggacagccagcccggccagcacagtccccatcagccagcgctgcaccacctgccagaacggacggcccgtcataaagacagccaccgagcccgccatcagaataatcagtccgttaactgtcaggctgatcataatctgtattgttccgagcgccagagactgtaccagcacactgccgtgccccggcacaataaactgcggcagcagcgataaatacatcaccgccactttcgggttcgccaggctggtcagaaaccccatggtgaacaatttttccggcttatcttccggtaaatcccgcaccgaaaatgcagagcgtccgcccggtttgaccgactgccacgccagccagagcagatacaatgcccccgcaatacgcaaagcatcataggcataaggaacagcaaaaaagagcgcggtgataccaaatgccgcactgagcatataaaaaataaatgccaggccgacaccggcaagagaaatatatccggcccgctttccctgacagagtgagcgggagatcagataaatcatattagggccgggcgttaataccattcccagtgcaaccagggcaaatccgagcaatgacgtcaaatcaggcataatgcactccatgacagataatgcataacagattataagatagattattggttttacaggatatataaccacccggaacaggcgatcattgattatagccggaacaaaaaaaaagcagcaacgatataattcagtatgtattaataacgtgggttactgcacaaaatcgcaggcataaaaaaagcgccttcatttcagcgctttttccgggaccgtctgttctcagtgaacctgtgacgggctgagcagctgataaatggtatccggggtatatttctcaccggaaaaatagatattccagtcagtcagcatctccgtattcagcggatatacgcccccctcttccatctcttcaacataaaacggctggttgatcagtttgccggtaaacacgtcattatccagagtttccgggataaaccacatgtgctccaggtcatcctcatccccgtacggaatgccgcatttgaccataaacgcccacggatgttcatcttcttcatcacgggcttttttaccgaataatccaccgagcagaccttttttcgttttgaccaccggctgaccgtattccgcaaacatctgggcaaaatagtgccagcgcaggcgggcttttaccgccatttcatgggtttcactgttcgggcggtaaaacataatggcggcatcgtcgtcgaaaccacggaaaaatgtctgtaacaccggcgaactttcatttacacggaatagcatacaggatggatggtcatgctgatcgtcgcgatctccgcgatcgccgagaaattcattttccggcatattatcgtgagagtaatcgatctcttcgagaggcttcagctggtcgatcggggtatttttgttgatctggcggatcccttcctgatatggcagcgccacaatatattccagctgtttttccgtctggccgcacagcatcggctcattaaacagcactttgccttcattaagactctgcccgataaaactgcgcagcagatcaggaatgccatagtacgcattaatggtatgcggcagcagcagttccacttccgggatcccgcagcgcagcaggccgtgtgtgtggaaccagtacatggtcggcggggaattttccgtgtcatagattgcatgaatggtatacagagattcaatgttcagctgcacgtcgttttccagctgaaaattgagccactcacgggtaaaaccgcgcccggctgccgagatatcgatacccagtaataaatccggcaccagaatctgtaccatcttcagctggtaccggtaacttcgcagcacgtcattctgtaaaaggcattcaacataaatatcctgttcggtctggttgacctcggccagcagtccggcagacagcggatcggttgaatagtaaggattgatttccagttccggtgcccgcggtgccagtgacaccagaaacagcagttcttcatcaccgtaatgacaggtgtaataaaagctgttctcatcatgttccgcgtattcaatatcactctgtgtgaaaaaggtttgtgatgccagacgctcttctaactctgccaggttgagccgcgagggagagaatgccacaacctccgacgtcatcctcttacctttaccttccgcaacctcaaggtaatattgttttatatccatcggtaatgcctttatccgttctgagttgtgctgctgtgctgaaattaaactcatttgttcatacgtataagtaccacattttgtatgcggagttcattcagaataatccacctattattctgtaaatatacattttgaccaaaatcgtacatccgggagcaaaaacggctataatccggtcaattgcccgccctgttctgaggtatgaaaagttgaataataacaaaaacttaacgattaccgttccgttacctgagccctatcatacagcggattttctcgcatttcatttacgtgataatcaccatgtggccgaagaggtcacggaaaaccgggtgatgaaaggaatttgcctgcacggccaccccgcgttactgacactggaaatcagttcaggagaagcgcgtgtcaccctcagcactgacggcccggggccactgccggaagacgaagcccgtatgcagcatctcgcccggcatatgctcggtctgatccagccggtggaggaattcgagacacaatatcaggatcacccgctggccggtccccttatccggcaacagaaagggctgcggatctaccagtccgccacaccgtttgaagccattaactgggcgattatcggtcagcaaatcagcgttcaggccgcgatttccatccgccgccgcctgattcagcatatcggcctgcgccactcctccggactgtggtgctacccggatgcggcacatattttacagaccgattttgacgggctgcgcagctgcggtttctctgtcggtaaagccaatgccctgctggcactgagtgagcaactggaaagcggagcgctggtgctgccggatgtggtcacaccggagaatgcagacgcggtttccgcctcactgacggcgatcaaaggtatcggcacctggacggtcagctatgccctgctgcgcggctttaactatctgaacggctcactgcacggtgatgttgcggtacggcgtaatctgcagcgcctgctggcgcgggatgaaaaaataacggcggatgaaactcaggaatggctggcagatttcgccccgtggcgggctctgatggctgctcatctgtggcggctggagtctgccgccgggtactgagcaaaaaaaatgccgcaaatgcggcattttttctctctgtgaactcagcgcagccagttggtttttgccagctccacaatctcatcaccgcgcccgttgataatcgcgcgcagcatatacagactgaagcctttggcctgctcaaacttaatttccggcggcatggccagttcctgtttggccgtcaccacatccaccagaaccgggccgtcatgggcaaatgcggttttcagcgcatcgtccagtgactcgctgtcttcaacgcggatccctttgatccccatggcatttgccatcgcggcaaaatccgggttgtgcagatcggttccgtcagtcagataaccgcccgctttcatctccatcgccacaaaacccagcacgctgttgttaaagatgacaattttcaccggcagctgcatctgtgccagggaaatgaaatcccccatcagcatactgaatccgccgtcaccgcacatcgccaccacctgacgcttgcggtcaggcgcctgagcgccgatagcctgcgccatggcgtttgccatcgagccgtggttaaaggagcctatcagccgccgtttgccgttcatggtgagataacgcgccgcccagaccgtcggggtgcccacatcacaggtgaatacggtgtcatcatccgccagctcactgattttcttcgccagatactgcggatggatcagttcccgtttgcttgcggttgccagtgcatcgaggtcactgcgggcggtctgatagtgtttcagcgccgcatccagatgggtgcgatcctctttggcctgcaggcgcggctgaatagcgttgagtgtggctttgatatccccgataaccgccatatccaccgcacagtgtgcaccgaggctgcccgggttgatatccacctgaataatttttgctttggccggataaaacgcgcggtacgggaagtgcgtgccgagcagcaccagggtatccgcattttccatcgcataatacccggaggaaaatccgataagcccggtcatcccgacactgtacgggttatcatactcaatatgctctttgccgcgcagtgcatgcaccaccggtgctttcagggtttccgccagtttgataacttcatcatgtgcccctgcacacccggctccgcacatcagtgtgatgtttttcgcaccgttaagggcatccgccagtttcaccagctcatcccgctgcggcatcaccagcggcagagacggctcataccagacattgcgggccgattccggtgccggtcttaatgccacatcccccggaatgaccaccacggccacgccgcgctccagaatcgccttgcgcatggcaatacccagcacctgctggatctgctcaggattggaaaccagctcacaatagacgctgcattcacggaacagctcctgcggatgagtttcctggaagtaatggctgccgatttcgccggaaggaatatgtgcggcaattgccagcaccggcacgcggttgcgctgacaatcaaataatccgttgattaagtggaggttacccggcccgcaggaaccggcgcacaccgccagtttaccggtcagatgggcttccgccccggcggcaaacgcggccacttcctcatgccgggtgcccatccattcaatgctgcccagtttacgtaagctgtcacttaacccgttcagtgagtctccggtgacaccccagatacggttgattcctgcatccgccaacatttttgcgatataacccgctacagtctgcttcatcgtaaatcttccctcatactggtgataaatctgattcgcaataagatgctgcacagaacaatacaagcctgctctgtgtgtttatcctgtcatttcagtgtagcccgggctcgccgcagataaaaccaccagtaataagggaaattttcagcactaattcaggatattgccggagatccggcggaataatacaaaaatggctgcaaggatatataaatacacttttcttaatttctgtttaataatattaatattattgttatttcgggtgacgaatttatatttcacgcagaataaacataaaaaaccgggaaatcaaaatttctataaaatattgatattaataaataatataatatcaatttatcactgtgatattattttttaacgatatcatccttattattcatgcaccatgaaatactgatatgatataaacacgatctccgtcacgctcacttttttaatactgacgttaaaatccctcctgcaaataataacgaaaacagctgctgacagaaacccgccggttccggaaggcagaccttttttcgtaaaaataaaatgtactcatgttgcgccggcgctgtggtatgaccggtttccggtcatacccgcgcttacatcagggattctttatcagcacacaaaccggtttcagttacggggtaaatgtaatgaccaataaatacaatgtcagtgaaaaactctttgcgcttgaggcgttcagcaagaaaacgcgccaggatttgcataaaatccctgagctgtccggtgaagaatataaaacctcaaaatactgccgcgaactgatggaaagcttcggctacaccatccgtcagtttgagggatacaccggctttaccgctgaactgaccgtcaatccggcataccgcctgattgcttaccgcaccgacatcgacggcctggaaatgccggacatgacctgcaacgagcacagttccgtacacgaaggctgcgcccacaactgtggtcacgacacccatatgaccatcgcgctgactgcggcaaaatacctcagcgaacaccgcgatgaactgacacacaatgtccgttttgtcttccagatggcggaagaagatatgcgtgtgccgggtgcggataaaatggtggaaatgggctgcatggacggtgtggatgaagtctacgggctgcataacgacgccgcgattgaaaccggctgcatccgttttaacgcgggtgtgatgtcctcttacggctccgcctggacgctggatgtacacggtgtttccgcgcacggctccacgccgcacaaagggctggatgctatccgcgaagccacccgtatcattgattacatggattatatcgtcgccaagaaaaccgatcctttcagcccggctgttttcggctgcggtatgatcaacggcggtaccatcccgaatgcgctggctgattatgtgcaggcacgcggcaccatccgttctatggatgaagaaaccgataaaatcttaaaagccagctttaaagagattgttgcccgcagtgaagccggtggttttaaaaccacactggaagcctgcggttacccggccgtaattaaccatccgcaggcagcggaagtcattaaaaacgcggcagcggccttcttaccggctgaaaatattgactcaaacggtaagccgatgaccggcagtgaagatttcagctatatgattaatgccaccaaagacagattaggtgccatgtatttcctcggcagcggtaacaaagccaaaggaattaataactatctgcatgccaatccgtattttgttgatgacgattgcctgctgatcggtgcgcaaatctttattaatattgccacccgctaaaaaagattacacacagcaaacacaaagcccggtaacagacgttaccgggctttttttatccggaatacaaaggaatcagagctcaggcaatgcgcggtaaagccggtcacgggctttaggatcaaccggcagccactgttccggctggtgaatataattcaggtcaagatgcggcgcataacaggaaataaagtcatacatataatccttcagatgtgtatgacggctgatacaaatatgggtatagctcggtttcaccagattaccgatattaatacagcgcagtgagtcactgtcttccgccggatcaaacgccacggtggaaataacaccgacacccgctccgcgcttcacatagaatttaataatttccgtatcgaccgcggttaataccacattcggcgtcaggtggttctgataaaatacctgatccagcttggaacggccggtgaatccgaatacataggtgatcagcggataatgagccagctcctgaatcgtcagctgctcattctgtgccagcgggtgatcgtgcggtacaatcgcactgcgggaccactgatagcacggcagtgtcagtaaatcgtcatacagatgcagggattcggtggcgattgcaaaatccacatccccgtttttcaccatttccgccagctgtgccggagcaccctgatggaaatgcagcgaaatgttcgggtaacgcgcattaaagcgttcaatcactttcggtaatttataacggatttgcgtgtgggtggtggcaatacggagattctgttttgtcgtggtatcttcgtgtgataccagacttttaattttatcaaactgcgccagaatatcgcaggcaacacgatgaacttcttcaccaatcggactgagcgataataagttattatttttccggttgaataaagaaacgttcagttcatcttcaagaattttaagctgcttgctcactgtcggctgcgaggtatacagcttctcggcggcattcgtgatattaaagtcactcctgaccacctcaacaaaacttttgagctgattaatgttcattgcttatttatccagttataaaacggattcaaaatattaaaattattgataaacagggttataagagtaatacaacatgctgtgtatcaggatgatagcacaaggcgggtgatgaagaaataaacacgtcccgcgaaaagcggtatccgttattagcaggctaataacggatttttgagatgagattcagtatcactcaatatcacgaaattacatcagttcagattcgaccggcaaaataacggtttctgctttccaggattcccgttcatttccgctgtcgcgtttaccccggccttcaatctcggtgaagaaccagccaaccggtacttcaaagatatccgcaatacggactaaacaatccacatcaacacggtttacaccacgttcataacgtgacatctgctgctgactgatttcaatcatttcagccagtcttgctgcagtaatgccgtgatctttccgtaacacctgaattttttgcccgacggcgcgtgctatcgagttttttgctttggtcatgtcgctatccctcacatatggctgtgataaccatcagattcctctctgatgactaacaaaaatatgcgtttattaaagaaagtggaccaattgatattcacaaagttttactctttgttgttgttttaactgccgcatgtatgtacttatgcaaaccagcctcgtacacatgttgaaacacatattacatattcatttaccaaattgaaacctaccgctccggcacctaacgaattgtaaaaaaaagaattattcggtgtccgaaagagtgataaccctatgtattatagtatatttaccttttctttcacccccgtaccaggtataaaccactaaaaataaaatgactcattagtggtataaaatagtaattatttagctttaatagagtaacaaaccacaattaaatggaaaaaaaacgatatatcttgaaacatttatatctttcttaaattgctgttggcagatatcactgcatgattttcatattcagcagataacaccaaagtttatcttattattacgtaaagaaatcattgaggactgtgattatgcgttaattacatcagatgtaattatcaggaaaacgcatacagaaaattgagaaatcaggtgaaacatactgataacattgtctgttttctgaaaccaccctatatattgcttaaatttaaaccattcacattataattatgctgataatttaaaatacatcggattgtgatactaaacacgttccgtttcacacaacaaaatatgttgaaaagcatccgtttaagatgccttatttccggggtgatctgcacttccgttgatttttcagaaaaaaatagcattgaacactttacgatacagagaagttaaatgccaaatacacgatattaattagtacaaaaacccactaattttacaaaaattatgatttatgctaaattaggtgacctcgtttcaaaacaaaggtgctttttttggttattacaacacaatactttcctattcttcctgtcctgtctgcggtttcctgtaccgtctgccgttagcgtcacatattcaacaatcaatctatttaacgggaaacatgaatacgggaaaaaatacgtatttatacttaccgatttagtattaaacatctcctgctgccgatgaattcactatcacacaaaaagtcattgcagatttgagtgaaatctcagttacgtgaatccccgtcataaaacaaaaggatacaacgatgagacgcaagaaaacaaaacaaaaacctttaaatatcaatgatattactatcattgatgatggaaaattaaagaaagccatcaccgctgcctcactgggtaatgccatggagtggtttgatttcggggtctacggcttcctggcgtatgtgctgggtcaggtcttcttcccttccgcctccccgggcatacagatgatcgcggcgttagcgacgttctccgtaccgtttttggtacgtccgctgggcggggtctttttcggcattatgggcgacaaattcggccgccagaaagtgctttccgtcaccatcattattatggctgtcagtaccttctgtatcggtctcatcccgtcttatgaaagtatcgggatctgggcaccggtgctgttactgctggcaaaactggctcagggtttctccgtgggcggtgagtattccggtgcagctatctttgtagcggaatattcaccggatcgtaaacgcggatttatgggcagctggctggacttcggctcgattgccggtttcgtctgcggtgccggtgtggtggtgctgatctccagtattctcggtgaggaaaccttccgtgaatggggctggcgtatcccgttcttcctggcgctgccgctgggcgttatcggcctgtatctgcgtcatgccctggaggaaacaccggctttccagcagcatgttgaggatatgaaaaatgccaacccggaaaccggcgaagataagccccgcgtttcactgcgcagcattgcctcacagtacggtaagggtctgatgatttgtgtcgggctggtgattgccaccaacgtcacttattacatgctgctgacctatatgccgagttatctgtcgcataacctgaattacagtgcggatcacggtgtgctgattattatcgcgattatgattggcatgctgttcgtacagcctctgatcgggatgatgagtgaccgcatcggccgtaaaccgtttgtcctcgcgggcagtatcgggttatttgtgctggccattccggcatttatgctgattaacagtggtgtcatcggcctgattttcttaggcttactgatcctggcggtgctgcttaactgctttaccggtgtgatggcctctattttaccggccattttcccgacaaaaatccgttacagtgcactggctatctcattcaatatctcagtgctgattgccggtgccaccccgaccgccgccgcctggctggtcgaggcgaccaataatctgtatatgccggcctattatctgatggtgattgccgttatcgggatgattactgcgattgtgatgaaagaaaccgccaataagccattacgcggcgccacaccggccgcatctgaccgcgcggaagccaaagagattttgctcgagcattacgataatatcgaacacaagattgaggcgattgatgaggagattgccgcgttgcagaaacgccgtcagtcactgattgatcagcaccctaaactggactgatgtcctgctcaggcccgcctctccggatgcgggcccttttattgtttatgcgggaggtaaagttatgacggattcagcaccggccgttgtctggctgcagcacgatctgcggctgacagataacacggcgctttacgccgcctgtcaggcacaccggcaggtaaaactgatttttacactcacgccgggacagtgggagcagcacactatgtccccgtcacagcaggcgctgattttctgtcagctgcacgcgctgaacacatccgcagccgcactcgggatcaccctgcatgtgcagccgtgccatacctttgaggatgccgctgactggctggccgcgtggtgccgcgaacatcgtatccccgctgtctatgtcaataaacagtacgggctgaatgaacagcgccgtgatgcccgctttgccgcgcgtctgccggacacctgccgcttttatgcctttgatgacagtgtcctgctgccgccgggcagtgtgagcacacaacaaggcggactctacaaagtgttcaccccgttccggcgcgcatttctcaccgcactgatgcagaccaccgtccgcgtgctgccggtaccggaggccaaaggccagccggtctccccggcaccgcttaatctgccgcagcaggagcatgccctcttcccttccggagaagaggccgcactgcagcggctggcggatttttgtcagaaacaggctgcggattacaaaacagaacgggattttccggcgattgacggcaccagccgcatctccgcgtatctcgctaccggaattttgtccccccgccagtgcctgagccgtctgcgcctgcatttcccgatggtcgctgatgagccggaaagcggcgcttatacctggctcagtgagcttatctggcgggaattttatctgcatcagctggcacagtacccggatatcagccgtcaccgcccgatgcagcgctggacagagtccattatctggtcaccggataacagcgggctgcttgcctggcagcagggtaaaaccgggttcccgctggtcgatgcggccatgcgccagctgaatgaaaccggctggatgcataaccgcctgcggatgatcacggccagttttctggtcaaggatttactgactgactggcggcgcggcgagcactattttatgtcacagctgattgacggtgaatttgccgccaataacggcggctggcagtgggcagcctccaccggtcatgattcggtgccgtatttccggattttcaacccggtcacgcagggaaaacggtttgatccggacggcagctttatccgccgctggctgccggagctggcagaagtacctgcgaaatacattcatacaccccatgaatgggcggagaaaaatcagcgtgagattgattatccgaaaccggtggtggatcaccggatggcgaggatccgcgctatcgatgcttacgaaaccgcccgccggaccgctgccggcggggatgataatccgtattaatctgttttgtctgctgaccggcgcacagtgctgtaggtcagcagatgctccagattatagtaacgggctttattcagtacggtggtgtgagacatcccgatttcacgggacactttgcgggccgaaccgtagcggcgcagataatcttccagcaggcttttttcctgccgcgcaagagactctttcaggttgatatcttcctgcaccggcaataccgcagggggtatttccgttttcggtaccggctgcggcctgagcaccggagaggccatcacttcctcatggggcagccacagatccccgacggtaatttcccggccggaagccagatggatggcccgcaaaatcacgttttgcagttcccgcacgttacccggccaggaataggccattaactggtgatatgcatcctgggacagactgagctgtttattcagctctgtcgtgtatttgctgataaagcgctgcagtaacagcgggatatccgtcttccgctctttcagcggcgggatattaatcgggatcacgttgatccggtaatagagatcttcacggaacgatttgttctcgatcatctcttccagattccggttggtggcgacaatgatccgcacatccaccgggatctctttgtgcccgccgacgcggcggatcacgccttcctgtaatacccgcagtaatttactttgcaggataagggaaagctcgccgaattcatccagaaacacggtgccgtggttggcggattcaaacaaccccatctttccgcccttgctggcgccgctgaacgcgccgccctcataaccgaacagctcactttcaatcaggttttccggcagtgccgcacagttaatcggcgcaaacgggtgagcgctgcggtcgctggcgttatgaatggcgcgggcaaacagctctttaccggtaccggtttcaccgcggatcagtaccgtatacgggcttattgagatttttttagcgaaatcaatcaggttcatcatgatttcgctttcacagataatgtcatcaaagctgaacggcaggcttttattcaccgaagacgccatttgctgcactgagcgcagactcttgaaggtgataaccgcccccatcacctgagactcttcactcagaatcggacggccggagcagatatagtacaactcccctttcggcgtactggtgaccatctgatagtgatcgaaactgttgccgccgagcagtttggtgagcaccgactggtttttgccgctgagaattttgctgatattgacgccgacaatattttcccgtgagatcgagaaaaagtcttccgccactttgttgaagtagttgatattaccctgattattgataccgataatgccgtccgtggtggattccagaatcgcctgtaattctttttctttacgctcgtagggctgtaatttggaacgggtgacactgataacatcaggattaagcaggagtttgctcagcagcagcttaacatcccgctcgcactccgtattgaatttgacataaattttgcacggaaagacttccatggaattaatgctgatttcggaggccgaaaattcattgatgacttcttccaccatggcgacgcggtcaatggtattaattaaccatctatatgcagacatgtgattagtcactcccggttagtgtatgtagtgctcatttttcacccacccgaccagggttaacccatcttaggtaatcactgagaggtgaacaaagggcgaaatacaacaaaatagtgcgcaataaaaaaaccatatgataagtagccttatcatacagagtgtaattgttattttgggttttgttacgttacttactataaacaagttcagtcggcttgtacccgccagatatctcaattctatgaaaaaaagtccgcagattgtcaggtttacacctgcatttattggagtggcaaatcattaaacgcgcggtaattaatggaattgattattcatggctttgatcattatcaaccgccggacgtatcgattcaggaaaaaatttaaaaagagatctggatcacccttcccttttggggctataatgtgacgcaagtccggttttatccctcaatgtgattaacctcactatcagaaagtggcaacttactgtcaactttctttccactttgtcatttttacttacagtccgctttccacttcctccgcactgactttgtctaatctataccttaaaattatttatctcttttaattcaatgtgttataaaaataactcctgagttggcacggctattgcttttattactgcaacaacaacacatgttggcataataaaaaattattctttggaggatttatgcacgattatacgaataaaggttatgacactaagattgttcacgctggccagcaggctgatccactgactggtgcgttatcaaccccaatctatcagacctctacattcgtcttcgacagcgcagcacaaggggcagcacgtttcgcattagaagaagaaggttatatctactcacgtttaggtaaccctactaacgcagcattagaagaaaaaatgcgtgtactggaaaacggcgaagcagctctggcgacttcttccggtatcgcagctatctctaccactatcctgactatgtgcggccagggcgaccatatcgttgcttctgacactctgtacggctgtacttatgctctgctgtctcacaccctgcctaaattcggtatcgaagtcactttcgttcgtgcaaatgaccctgcgaacatcaaagcggcgatgaaaccaaacaccaaaatggtttacgtcgaaactccggctaacccgactctggcaatgatcgacctcgaagcagcggcaaatgttgctcacgaaggcggcgcaatgctggttgtggataacaccttcatgtctccgtactgccagcgtcctctggaattaggtgcagacatcgtggttcacagtgtgaccaaatacatcaacggccacggcgacgttatcggtggtgtgattgtcggtcctgctgacttcctggttcctgcccgtctggttggtgttaaagacatcaccggtggtgtaatgagcccgttcaacgcatggttaaccctgcgcggtctgaaaacactgcacgtccgtatggaacgtcactgctctaacgcaatgaaagtggctaaatatctggaatctaacccgaacgtagaagcagtattctaccctggtctgccgtctcacccgcagcacgagttagcgaaaaaacagatgagcaacttcggcggtatgatcagctttgaaatcaaaggcggtatcgaagcaggccgtaaagtgatggactctgttgagttatgcatgctggcagtaagcctgggcgatactgaaactctgattcagcaccctgcatcaatgactcactctccggttccggctgaagagcgtctgaaagcaggtatcaccgatggtctgattcgtatctctgtcggtctggaaacacctgaagacatcattgctgacctggaacaggctattgcgaaagcagttgcttaagaccagagcggaaaattaagtcctgcagtatgtactcacctcatttgccgttaacacacagacggggtgagtacacgaagcacgcggaaaaattcattgagagccactctgaattctctccggcgtgctttttaagtatttaacaggttatttttagcggtaataaaaagaacaacgcagtgctgaaattttttagaaaccataatcacaataaattattatgaaaaccaagggggcttagtatggcggacatgacctcaaccgagaattccgcgaaagcgctgggcaaaataccatttacaatgtatgacgccggctgggtagtactttgtattggtatggcgatcggtgccggtaccgttgtaatgccgattcagatcggtctgaaaggtatttgggtatttattttagctttcatgattgcgtatccggcaacctatatgttgcagaagctgtacatgaatacgctgtctgaaagtgaagaatgtgaagactacacaaacataatcacacagtatctgggcagtaactggggtgtggcgctgggagttatttacttcctgatgcttatccacggtatctttatttactctctctctgttattttcgacagtgcctcttatctccatacgtttggtgttacagagggtgtgctttcaagctcactgatctatcgtgtggctgtctttgccgcgctgattttcattgcctccaagggcgagaaactgctgtttaaaatctccggtccgatggttatcgtcaaagtcggtatcattgtatcgctgggtctggtgatgatccctcactgggatttcaataacatcactgcattcccgccgattggtgactttacccgtgacgtgctgctgactgtaccgtttgcgttcttctctgcggtcttcgttcagattctgaacccgatgaacatcgcgtaccgtaaactggaatcagacaaacgtgttgccacctaccgtgctatccgcgctcaccgcgtggcctatatcaccctggtgacaatcatcctgttcttctcattctcctttacgttctctatcagtcatgagcaggccgtatccgcgtttgaacagaacatttctgcactggctattgctgctcaggttatcccgggcgcggtcgtgagtgtgatgaccaccgttctgaacatctttgcagttctgacagcattcttcggtatctatctgggcttccaggaatcagtgaaaggccttgcggttaacatcctttcccgcttcatggataaagagaaaatcaaccacaccgtattaaacatctgtatctctgtcttcatcgttgcattactgactgcatgggtgtcaacagggttctccgtggttgtcttcttccagattggtagtccgttatacgctatcgtttcctgcttaattcctgtttacctggtattccgtgtcgcgaaactgaaaaaattcaaagactggaaagcctggtgtgttatgggcttcggtatcctgctgctcatcgcaccgttcttcaaataccttgagtgacgggtaagagaaaacaggccatccgtcggtgtcccgcactgactgaaataaagtaaaacccggaaccggtcacagcaccggttccggaaagttaaaaaactcagcaccgcagtctgaataaaaaaacctctgtccttctgaccaatatattattaagttccttgattggttagcatgttgcgggagatattatctcccgctttttttcgcctgaaatttgtcccggtgctgctctgtcatctgtattacagttttatttctgccggatggcgggcacggcaaacccgtacagtaatccgcaaatcagctgtactggtctgtcttttttatttaaaagcggaaattatggtgattaaaaatcgcgcggggaaataatactgtccgcaataaggctcatccggatttcctgaatatccccttcttcattttcataaagaatgtcatccagcccggtgccggtcatattcatttcctcaaagaaacgacccggagtgagtttaaaggccagactgacacgcaacaacgtatccacatcaatacggtttaccccccgctcataacgcgagagctgctgctggctaatccctattctgtgtgccagctgctttgtggttaaacctgcattggtccggtattgtctgataacctgtccgatagcttcggatatcgcatatttcttcatcattaatcaataaccctataaagaccatcactaaaattccttatttagctcactgatcatagaaaaaacacttaaaactataagtagtttatcgtacatagggccatttttgaaaaaccaaaggttatgctgtttgtgagtacatgagggggtaaatgagactgaatgtttcgatatatttcgcctttaaaatcatagtgtaacgaaataatattacaaaatattaatcgattgaaagtacaatgaattagtagaataagtgttatataccaaataattagaaaaaaatatgttttcactccattcaaatacaaattccgagtttttacaggatgtgaaaaagtgtgtttgatcccacacatcggatttcagcataataggttgatgactcatcctaatatgaacagcaaaccgcagttaataaattaaattaatgtaaatattttacacgaaaaattaacttaattcgaattttgtcagaaacacagaaaccggcacaaaaaagccggtgacagttaccctgccaccggctgaatatccgcctgttatttcaccggattacagacgttcaatcaccatcgcgatcccctgcccgccaccgatacagagtgtcgccagaccggtggttttattctgagcctgtaatgcatgcagcagtgtcaccaggatacgggcaccactcgcaccaatcgggtgacccagggcaatcgccccgccgttgatgtttactttgtcaggatcaaaacccaggtcacggccgaccgcgagaaattgggaggcaaatgcttcgttggcttcgataagatcgatatccttcagtgacagccccgttttctccagcactttccgcgtggccggaaccggccccagccccatcatcgacggtgaaaccccgccggaggcataaccccggatgcgggcaagcggtgtcagtcccagtgatttagcacgggtttccgtcatcagcatcagagctgccgcaccgtcattgataccggaggcattaccggcagtcaccgttcccgctttatcaaaggccgggcgcagtttcgccagcccttctgccgttgatccggctttcgggaattcatcggtatccaccacgatatcccctttacggcttttcaccgtcaccggcacgatttcagccttaaaggcgccgcgctcaatcgcgctgacggctttctgctgtgatgacagtgccagtgcatcctgctcttcgcgggtcaggttataggctttggcgatgttctccgctgtgatccccatgtgatagttattctcggcacataacagcccgtcacgcagaatcacatcatgcactgcaccgtcgcccaggcggtaaccccagcgggcacggctgtcgagcagatacggcgcctgactcatattttccgtgccgcccgcgataataatgtccgcgtcaccgctgctgatcgcctgtgcgcccagcgcaacactcttcaggccggagccgcacactttattgacggtgaaagcacaggcgctttccggtataccgctgcgcagcaggatctggcgcgcagggttctgtccgagtccggcctgtagcacgttccccataatcacttcatccaccagccccggttccagctgcgtttttttcagtaacgcgctgaccactgccgagccgagttccacggcactgacacccgccagtgcgccgttaaagttgccgattgcggtacgcacggcactgacaataacgatattttccattgcgaaatccttactgtttagtatctgtcagaagaaagcgaggccgataatgaaaatcggtgccgagagcagcagggcggtgatgcagtaccccataatgtccctgacccccagcccggcgatcgccagtgcaggaagcgcccagaacggctgcgccatgttcatccactgttcaccgtaggcaatcgccatcacggacttaccgagatcagcccccagcgcctgggcagccggaataacaaacggcccctgaatcacccagtgaccgccgcctgacggcacggcaaagttgatcagcgcagagctgaagaacgtcatcagcgggaaggtttctttgttggcgacgttgataaagaattcagtgataagcccgcccagtccggagccttccatcatgagctggataccggcatagaacgggaactgcacgaggatcccggcggtactgcgggcggcggcactgacggcacgcatatacgccataggggttttatgcagcagcagaccggtcagcaggaaaatcatattcacggtgttaatggtgatgttgaaaccgtttttgatgaaatacatgccgaggaacgtgaagcccagaatcccgataatccatgcgataaggcggctttcttccatccggagagaaaccggcgcgtcttccggtaattttttctggaaatccggctcttcttcgagcagcgcagggtcgatcatcatgatgtcgtctttgcgcggcatcatcatgcgggtgacaaacggcatcaccagaatcagtgtcagggtgataaacaggttatacccggtgaacatggtctggctgacaggaataagcccggcgatatgctcgacagggttacccggtgtggcggccagcagcggcatagagccggagaaaccgccaccccaggtcataaacccgatataggcacaggcgatcagcagcgggtagtcagagcccggtacacggcgggccacttcgcgggcaaacatcgccccgaccaccagcccgaatccccagttaatgacacaggcaaccgagccgaaaaacgtcaccagcatcacaccctgaaccggggtttttgccagtgaggcagtcagccgcagaatacgtttaaccggcggggagctggccagcgcgtgaccggtcacgatgatcagcgccatctgcatcccgaacgccagcaggttccagaatccgtttccccataagttcaccagatccattggtgtgcttggtgtgagtgccagcgcgatgataaacgtcagcatggtcagcagcattgcgaagatcagcggatccggcagatagcggctcaccacacgggtcatgactcgtgagatgcgtcctatcatacggcttcccccgcagtcaccagcggcatttcacagacatccggtgacacaataaaatgcgctgcggttttttcgcggatggtatcgatatccgtacccggcgcgtattcgcacaaaatcatctgatcgttttcaaagcggaataacgccagttccgtcaccagtacatccaccgcttttacggcggtcagcggcatggtgcactccggcaggattttggcggaaccgtcttttgcacagtgctccatggctatgatcactttgcgcgcaccggtcacgagatccatcgcaccgcccatacccggcaccattttgcccggtaccacccagttggcgaggtttgcctgttcatccacctgtaagccgcccagtacgctggcatccacatgaccgccgcggatcagcgcgaaagagaaggcgctgtcaaacatcgacgcgcccggcagaataccgcacggctgaccgcctgcattgaccagattcttatccggcgttgttaccggcccgagaccgagaaaaccgttttctgactgtaatgtgatatgcacgccttccggcagatagttcgccacctgtgtcggcagcccgatcccgaggttcaccacatcaccgtcattcagttcaagtgccacacggcgggcgattaattcttttgcattcatgatgttttccttattctgcaatcagccagtcaataattgcccctggtgtggcaacacaatccgggtcgatatcccccaccgcgaccatttcgtccggttcggcaatggtgatatccgccgccagcgccatcagcgggttaaagttgcgggcactgaggtcataggtgaggtttccgagcgggtcggctttttgtgcctgaatcagcgccagatcagcgcggaggggaagttcaaggaggtaatcacggccatcgagggtaattttctgtttgccttcttccacgaccgtaccgacaccggtcggggtgaggaatccgcccagtccggcaccgccgcagcggatttgctctgccagcgtgccctgcgggatcagctgtacttccatttcaccggcgatcatgcgccgcccggtttccgggtttgtcccgatgtgggaagcgatgacttttttcacccgtccgttgacaatcagcgggcccaggccggtatccacgaatgcggtatcattggcgataatggttaactctttgacgccggattctaataattcagtcattaaacgcggcggtgtaccaacgcccataaatccgccgaccataattgtcatgccgtcacgaaaaaattcaccggcttttttcaccgttatttgtttattcttcatagcacttcccttttataaaaaaatatagacacaaaggtaatagcaagcgctatgccaataataaaacctgtattttgttatatttacatcactctaacttactgatatatattgctttaaatattataaaaataaacttattaacatattataaataaatgattcattcctgatggtgaaataaaatgcacagtgtgaaaatttattcacaacaaaaaaagcacggtgaatttattttcaccgtgctttttaaaattatttttataaaattattattaattattcaatatcgtattcctgcaatttatacattaatgcccggcggctgatccccagcgcagatgcggtatgggttttgttattctgaaattccgccagggcggaaataatcagctctttctcgtaagctttaatattctctttcaggttcaggcccggctcctgcgtgaccggaatcagtgccaccggctggctgcggacctgtgccagtaactgctccggcagatcttcggggaaaatcacataaccggtgctcataatcactgcccgttcaatcacgttggaaatctcccgtacattgcccggccactggtagttcatcagcaatgccagggtttccggtgccagctcgacaatatcgcggttattttcctgactgaatttctgcagaaaatgggaggccagcaaacccacatcctccggccgctcacgcagcggcggcaggttcagatgaataacattgagacggtaaaacagatcctggcggaaatgcccttcccgcacccgttcatgcatatcgcggttggtcgcggcaataatgcggatatccacacggatggttttactgccgccgacccgttcgaattctttctcctgcaccacccgcagcagtttcacctgtaaatccgccggcatttcaccgacttcatcaagcagcaatgttccgccgctggcgcgttcaaataatccctgacgctgtacctgtgccccggtaaatgcgcccttttcatggccgaacagctcactttccagcagcgagccgggcagcgccccgcagttcactttaataaaggggccgttggccctttcgctgttgtaatggattgcccgcgccaccacttccttcccggtgccgctttccccggtgataagcactgtcgcctgactgcgcgagactttggcgatatcgcggcagatttccatcattttcgggttacgggtcagcacccgtccccactggtagctgtcgctcagttcgcggtgcagcagattgatttcctgtttcatctcctgcaactgtaatgcacgggagataagcagtttcagctccgtcaggtcaaagggctttatcacataatcaaacgccccgagacgcagcgcgtccactgccgtttccacagcggcataggcggtcatcagaatgaccggcacttccgggttcagctcccgcatccgtttgagggcctcaataccgtccagtttcggcatgcggatatccatcagcaccacatccggtttatcctgcacaaagcttatcagcgccgcctcgccgtcctccgccacccgggtttcatgaccatcaatagaaaaggcggtctgtaacatccggcagagattcttttcatcatcaactatcagaagccggtacgatttatgtgtaatcatttttcttaccctgcgttatcggcaacgttatggtgaacgtcgttccatgatgttcctgactttcaaggaaaatatcaccgccgtgaccggcaatgatccgctggctgatagccagtcccagcccggttcccgaggctttggtggtaaagaacgggtcaaaaattttcttctgcagcgccgccggaattccggtgccgtcatcgcggatcaccaccatgacccgctgctcttccatgtaacaggtggagataaagagattgcctctggccggaatcgactgcaccgcgtttatcatgatattgagcagcacctgacgcagcagttcgctgttggcctcaatcagcggcagtgtgtcatccggctcccaggtaaaggtgacccgtgcctccacccctttggttttgaccagcaccagggcttcctcaatcagccggttgacgctgatcgggcggaatgtgccggtctgcggccgggagaaatcaagcagctggcggatgatccggtcaatggaatccacttccttgagaataatactgatatattccagtttatccgggtgattttccagttctttgaggatctgcacgaaaccgctgatcgccgtcagcgggttacgcacctcatgggccactcccgccatcagctcgccgagtgtcgcgagtttttccgcctgctgcatacggcgctgaacctctttctgcgcagtaagatctttaaatatcaccagcgcgccgataagctccccgcccgcattacggatgcggctggtgctgacgtttatctgaatggtgcggtcacgggcgggataggcaatttccagactgacgtgctcaataccgcgcttcagggtatcgagaaccgggctggagaaactgcgcccctcaaaaacgtcaccgtaatatttgccgtgcagatcccgctccagatagccggttatttcttccgccgccgggttaatcatggtgacacagccgttgatatccaccgcgatcacgccgtccgccgcactttcaataatcagttcgttgagggttttcatctcccgcagtgtctgtgccagggcgttgacgctgtcgctgatctcccccatttcccctttcatcatcggcagatgggtattgagatcacgggagagatcactgaggccgcttttaatcgcgccgatatcccggctgaaatgacgggaaaagacgataataatcagcagactgaacaggatcccgagtgcaatgaccgcgataattttgacatccatcgccagcgcctggcggtcaatatcatccgtcagttcgttcgcccagatatagccgatcacctcgccgttacgcctgacaggaatcatggcgttcataatattaccgcgcacctggcttccccagccgacctccggctctcccgttgccatcacatgacggccggggtgatcctcactgattcgggtaccggttttgttgccgtaacgggcacgcggagaataggtcacaataccgtcgagtttacggtggtaatacccggcgccgaccccggggaaggtggaagtgataatttccgccgccggatacagtttttcgctgatcagcgccaggcgctggtcacgcggcagggatgcggcaaggtcatattcatcattcagtgcctgttccagcagaccggcaacggaatagagtttgttccgtttctcctgcaacaacgcggaacgcccctctgtttccacaaaataaccgatgataagtgtcggcacggtgaccagcagaatggccatcaatatgagtttgtcacgcagactgaagggataatatttatgcaacacagaaggcccgtctgaaaagcagtatgattcaccagcatatacaactgattaaaaaatatctttgcgaacggtcatagttccggaatctctgtaaaaacaacaggataattgatgattcggaatgttacaggcgggagaaaacagataatacggcagcagagaggggatctgctgccggaacggtaaaaaatccttatttcacaaactcactggcttcacgcgccagtttgccgatggctgcccagtcttttgctttgataagcgaagccggaaccatccacgagccgccgcaggccacaatctgcgggatagccagatagtcgcggatattgttcagcccgataccaccggtcggcatcacctgtaactgatgatacggcgccagcatggctttgatcatcggaataccgcctgacggctctgccgggaagaatttcacaaaatcgatgcccagctccagtgcctgctcaaccgcgctggggttgttaatccccggcacaatcgggatatcaatctgctgacacgcctgcacggtgttcgggttcagaccgggagagacgacaaactgtgccccggcggctttcgcctgacgcacctgctcgcggttaatcacggttcccgcgcccaccagcatatccgggcgggcttcgcgcagcagtttgatcgcttccgccgcacattcagtacggaaagtgatttccgccaccggcagaccgttatccgccagcgcattgcctaacgggataatatcttccgcgttatccacggcgatcaccggcacaattttcagctgccggaaacgggtaatcattgcctgtaattcggacatctcgttctcctcttttcccgttaaaacgtgttattcagtaaagtatcagtgaccgggcgggtcgccgcctgcgggataatcgcccctttgtgctgaatcaccacacccgcaagccggtggcccatccgggcagcgcgttcaatatccgcgccggtcagccagcccgccaggaacccggcgttgaatgcatcaccggctgacgtggtatcaaccacctgttccgccggggtggtggcaatagtgatggccggtgcgtcagtgcgcagatcacggtagtcacacccctgagcacccgcttttataatcgcctgcttcaccccggcttttgccagacgggcaaaggtggagttgcggtcgctgtcgccccacagacgtgcttcatcatcatcagtgaccagtgccatgtcggtcagtgcatacattgcctgataacagtcacgggtttcattttcatccgcccacagtgccgggcggtagttgctgtcaaacagaatggtcttgccctgctgtgacagcgttttcaggtcatccagcagttgcagccggtcttgcggcggcagaatggcaaggctgatcccgctgaggtaaatggcatccatctgcgccatctgtgccagcagcgccgggtattccggatggcggataagataacgcgccgccgaatcattgcgccagtaaagaaacgtgcgctcgccctgctcatccagctggataaggtataaccccggctgatgatgcggatcgatcagcacatgcgcagtattgaccccttccgcctgccagcggctgatcatacctttactgagcgggtcggttcccatggcagagataaaattcacctcaacggcgtctccggccgcacgggccagataaaccgcactgttcagggcatcacccccgtagcgctgaaccatctccccgaacggcgcaccgttgagttcaatcatgcactcgccgatcagaccaatgcgtttcactgtcattattcaccttttgcagcggaaaaataacgctgtgcattattgaaacagatatcacgcaccatctgtcccagcatattctcatccgccggaatttcaccatttaccgccagcgtaccgagcatattacacagaatacggcggaagtattcatgacgagtataggacaggaaactgcgggaatctgtcagcatcccgacaaactggcttaacagtcccagttgtgacagctgttcgagctgacgctgcatgccgtctttctggtcgttgaaccaccagccggaaccgaactgcactttacctgcgataccgccgccctggaagttgccgatcatggtcgccagcacttcgttatcacgcggattcaggcagtaaaggatggtgcgcggcagttcatcggttttatccatttcatcaagcagacgtgaaagcggataagccaccggcgcatcaccgatggaatcaaaaccgctgtcggcaccgagcagcttaaacatgcgcgtattgttgttgcgcagcgcaccgatgtgcaactgcatcacccagccgcgtttcgcatactgctttccgagccagaccagcaccgccgttgcgaactgcgcggtggcggtttcatcagggatttccccggcgagacgtttctgcagaatcgcatccagcaccgattcatccggtaccggtgcgtagcgcaggatctcaatgccgtggtcagaggcaacacaaccatgctgcgcaaagtgtaccagacggcgttccagcgcggtcagcaggtcgctgaaacggcggatatccacatcagcactctgtccgagcttcgcgatatagtccgtgaagccgtccagttcaattttaaaagcacgatccggacgccagctcggacgcacttcaatatcaaagctgtcatcctgcgcaatctgccggtggtattccagcgaatctgccgggtcatctgttgtgccgaccatatgcacattcatctgctgcataatgccgcgcgcggaaaattcaggttgcgccagtttttcattcgcttcatcccagatgctctgcgccgtttccggcccgaacactttgccggtgataccgaacgggcggcgcagttccagatgagtccagtgatacagcgggttaccgagagtcatcggcacggtttttgcccacgcctgatatttttcataatcactgctgtcgcgcccggtgataagctgctccgggatccccgccgaacgcatgccgcgccatttgtagtgatccccttccagccagatctgcccgaggttatcaaaacggcggttttccgcgatttcgcgcggattcaggtgacagtgatagtcatagattggcatgtccgccgcgtagtcatgataaagacggcgggcaatgtcgctgtgcagtaaaaagtcttcgcaaagaaactgtttcataaactctccgggattacagtgcggcaacggcctgacgggcaccgacatcaagtaactgctgatacgcgcgtttcaccgcatcaacaaagccctgctgtttcggcaggtcgttaccgaaaatggattcaattgccagcagctcatccaccaccgccacagacaggccgtgttttgcgcagattgccgcgaaggtttctgccagcgggtcacgcacatcgattttattgccctgctcatcggtgccgctgacataacgcatccagcccgccacacccagtgccagatgacgatagtcactgccgtccgcgatatgccgcgcaaccgggtccagcaggcgctgcgggagcttctggctgccgtccatcgcaatctgccaggtctggtgtttcagggacggattggtaaagcggtcaatcaggttatccgcataggcgaccaggtcggtttcttccggcatggtgagggtcggcgcctgctcatccagcatcagtgcacaggcagctttgcggtaatccgggttggtcatggtgtcggaaatatgggcataaccaccgagatagccgagatacgccaggaaggagtgactgccgttgagcatccgcagcttcattaattcaaacggcaccacatcctgcacaaactgcgcaccagcgcaatcccactcaggacggccgttgacaaaattatcttcaatcacccactgacggaacggctcacaggcgatagcacagttatcctctgttcccagaagctgcgcgatttccgccagtgtttccggggtggccgccggaacaatacggtcaaccatcgtgcacgggaaagtaacattggcttcaatccacgccgccagcgccggatcctgtaaccgcgccaggccgagtacggcttcacgggcaacatgaccattctcacggacgttgtcacaggagagcacagtaaacggcggcagaccgcgttcacgacggcgtttcagtgctgcagtgatgtagccgatagcagagcgcggggtctccggtgtggccagatcctgtttaatcagtgcattttccgggtcaagctgcccggtcgccggatcggtgcagtagcctttttcggtcacagtcagggaaacaatactgacatccggagacgccattttctcaatcaccgcatcaataccgtcgatcagcgggtgcatcgcttccttcattgaaccgataattttcagctctgttttatccacccctttctccgccacggtatacagcatggactgggctttcagcccttcgatcagtgccgcatcctgtgccgacatcaggttaacttcgcagtaaccccagtcgctgtctgttttttctaatacgtgatgggtatacagcgcctgatgtgcgcggtgaaacgcgccgcagccgaggtgaacaatacgggtggtgagacgatcagtcgtccagtcaggacgcgttgcggtgatgtccgcagtgacaagattcttttccattacaggctcccggggagcaggctgcgggagagatcccgcagcccggcaggtacaaaggtatgagatattattttgtatagaatgcgcggtgaatacccatttccagaccacggatttcagccagccctttcagacggccgatggcggaatagcccgggttggttttctttttcaggtcatccagcatctgatgaccgtgatccggacgcatcgggatcagagactcagagccgctctcacggcggcggttctcttcggcggcaaccgcgctgatcacattatacatatccacatcaccggccagatgcgccgcttcatggaaagtattcggattttcttcgcgcatggttgaacgcagatgcaggaagtaaatccgcggaccaaaggtctgaatcatattgaccagatcgttgtcagcacgcacgccgtaagagccggtgcacatggtgtaaccgttggcatcactgttgacggtatccgccatccactgcatatcttcaatcgtggagacaatgcgcggcaggccgaggataggacgcggaggatcatcaggatgcacagccattttcaggccgcactcttcagccaccggaatgattttattcaggaaatacgcaaagtgctcacgtaatttcgctttatcgataccggcgtaacgtttcaggtgctggcggaattgttcaagtgtatagccttcttccgcacccggaagaccggcaataatattgtttatcagtttttgtttttcgtcatcccgcatggtttcaaagcgggttttggcctgcgcaagttcttctgcggtgtagtcctgctcagccccttcgcgctgtaagaggtaaatttcgaacaccgcaaattcaatctgatcaaaacgtaatgcttttgagccgtccggcagctcatattccaggtcagtacgggtccagtcaagaaccggcatgaagttgtagcagacagtataaatcccgcaggcggcgaggttacgcagcgattgctgatagttggcaatccatttttcatactcaccggtctgtgttttgatgtcttcgtggataggcacactctcaaccacggtccattccagatggttagcttcaatcagcgccttgcgcttctgaatttcgtctgtggtccagacttcaccgttcgggatatggtgcagcgctgtcacgataccggtagcgcccgcctgacgaatatcagataaagtaaccggatctgccggtccgtaccaacgccaagtttgtttcatactaaacctcgtttatgctccgcgaatatcatcactgtgtatttggttgaccaattaaatccccggtgtggcgagtattgctgtcaaaccttgctgtcacgtgtacagcgttgtcatcttcctatcaacacagagagacgtcaagcctgaaaacaatattggtcaaccaatatcacattttgttttatgattaatttattgtttttactgtaaataaaaatacatcaacgaaaagtgcgtttttgttactttcatttcactaaatcggtaaaccaaaatggtcactcatccggcagggcagatgagtgacaacacaggtattacgatggtgtatagttcaggactaactcaggcagccacaggctgagctgagggaaataggtcaccaccgccagcgccgcaatcagtgcgatatacatcggcaccagtggtttcaggactttatcaatactgacgccgcccacggaacacccgacaaacagtgcgctgccgaccggcggggtacagataccgatagccaggttgaatgtcatgatgatcccgaagtgtaccgggtcaatccccatatccatggcgacaggcaggaaaatcggggtgaaaatcagcaccgccggcgtcatatccataaagataccgacaatcagcaggatgatgttaatgaccagcaggatagtcagcgcgttatcggaaatcgccatcagaccgtcagcaatcagatacggcagatccgcgttcgccatcgcccatgacatccccatggaggcaccgatcaggagcagcacgatagaagttgtcactgccgattccagaataattttcggcaggcggctgaaactgacttcacgataaataatcacggccagaacaaagctgtagatcacggcaatcgcggatgcttctgtcgcggtaaagataccggcgataatcccgcccataatcaccacgatcagcatcagtgacggaacagctttccagacggttgagaaaaactcattccatgtcgggcgcggtgcaaccggataaccgcgtttttttgcgataatcccggaaacgatcatcagagacagccccatcaggatgcccggaatatacccggccaggaacagtgcggcaatcgacgtaccaccggaaaccagcgagtaaacaatcagcgtgttgctcggcgggatcagcaggcctgacgggcaggacgcaatattcactgcagcggacagttccgggtcatacccctcttttttctgcatcggggacatggtgccgccgaccgcagccgcagaagccactgcagaaccggaaatcgcaccaaacagcatgttcgccatgatattcacgtgcagcagtgagcccggcagacgaccgccgatcacttttgccacattaatcagccgggcagcgataccgccctggttcataatgttaccggcgagaataaagaacgggatcgccagcagcgagaagttatccacccctgccgccatacgctgggcgacaacagtaatcgcggagtcgagcggcagcgtcatggctatcgccactaacgatgacaggccgatagcgaaggaaaccggaacactgagaaccagcagaaacgcaaaggtgccgaagagcgcggcaatcacataccaatccataattaacctctcatcgcaccattaatggctgtcagtcagttcagtatttgctgaacccggctgaaagagtgaaaagatatcaaccagtgcatacataatcatcagtaagccgctgattggtaaacagagatagatgtaacccatctgccagcccagtgccggggtgatctgaccgctttccagtgtggaagagaccagtgtgctgccgccgtacaccagcacaatgcctgcaaaggcaataatggcaatctggataaataaactgacaaactgctttcttgcacctgacagtttcataacgagaagatcaatcgcgaggtgccggtgttgtcctgtggtgtaagccgcaccaatcatggcgacccacataaaaaggtaacgggcgagttcatcagtaatggtactcggggagctgaggatatagcgggataacacctgccatgtcacacagaacaccaggaatgctgataaacagatagtaaaaacagcaagccctttattaatcagcgctacaaggtttttcattggccttgtccttgttcttattttggttaaccaatttggcaactgtcacaccaaatacaaattttgctgttcgagcatagtctatcccgctgaaaacagtgagtgacggtgatcacattatgatttggttaaccagagattggggttattttgtgattgtggtcaaccaatgaaggtttaccttttgaccacttagtgacttgtgattaaggtgagacaacataataagaagctcattttcctccggagaaccctaacgtgaaaaacagcaaacgtatcctcagcactgttatcggcgcggtatttgctctcagcgctacccaggctttcgccgccaccacgctgaaactcagccataaccagaaccgtgatcatgctgttcacaaagccatgacacagtttgcggatgacgtaaaaaccaaaacaaacggtgacgtccgcatccgtatctacccggacgcgcaattgggcaaccagcgtgaatccatggaattaatgcagaacggtgcactggatatcgtcaaatccaatgctgctgaactggaagctttctcaccggcttactccgtctttaacctgccttacctgttccgtgacaaaccacactacgaaaaaattatctacggtgatatcggacaggagatcctcgactccagcaaagacagcgggtttgtcggtctgacttactatgatgcgggcgcgcgcagcttctatgccaagaaacctatccgcacaccggacgatctgaaaggtctgaaaatccgcgtacagccgagcccgacggctatctcaatggtaaaagcactcggcggtaacccgaccccgctggcttacggtgaactctataccgccttacagcagggcgtggtggatgcggcagaaaacaatatcccgtcctatacactgagccgtcacagcgaagtcaccaagttcttctctctggatgagcatacaatggtgccggatgtgctggtgatgtcgaccaaatcactggataagctgacaccggaacagcaggaaattgtgaagcaggcagccaaagactccgcacagacaatggcgaaactctgggaagcctcagagaaagaagaacgtgcgaaagttgagaagcagggtgttgaatttatcaccgttgataaagtcaccttccaggatgcggtaaaaccgatgtatgacgatattgccaagtccaaccctgagttatccaaaatggcagatcgtatccgcgacgtgaaataatcttcgttgcacctctcagataaaccaccctgtattaccaatattgggtggtttattttatattatagtcatcaaaatcatttttggttgaccaatatctggtaaactgactccgatttcattttatttatggcaccacagatgactcaatttatcgaatcaaaacgtccttatcaggaagttggccacgcattgcgtcagatgatcaccaatatgcactatgctgtgggtgataagcttcctcctgagcgcgaaattgctgagatgctcagtgtgtcccgtaccgtggtacgcgaggcacttattatgctggaactggaaaacctgatagaggtccgtaaaggatccggtatctatattactgacctgccgcatcagaaagacggttatacggataacggttcgctcaatgccgccggtccgtttgagctgttacaggcgcggcagctgctggaaagcaatatcgcggaatttgccgccacccaggccacaccggtggatatcgccaatatgcgcagtgccctgcagcgggaacgcgacgaactgaaaaccggggaagatgaaaccggcgaccgcgagtttcacctggccatcgcgcaggcgacccataacagcatgctggtggagttactgaaacaatcctgggcatggcgggaaaacaacccgatgtggctgaagctgcatacgcgcatcaccaataaagattaccgcaaagagtggatgaccgatcaccaggtgatcctcgccgccatgattaagaaagacccggcggcggccaaagaagccatgtggcagcatctggaaaatgtaaaacagcgcctgctggagctgtcggatgtcgatgacccgaattttgatggttatctgttcaattcctatcctgttgacctggtgcggaactgatccccctgcacaccttttttactctcagacaccagaaaccgggcaaaatcaacccggtttttttgaccgtaaaataaaaataataaccttattattcatagtgtgattcacctctcattcatataaaacatgcaattatctgatatataacacttattttataacagagaaatttattctctgccgtctgcggcagcggaatttttttagaaaattttttctgactacctgtgccactatccggccattacaataaccattaaatattcatcgcatattttacaggacaccaactatgagtaagaaaattgccactgtgctgatccacggcggacagcagcaggataaagtaaaccatgctattttcccggcgatcaccaccgccagtacgtttgtgcagaccagcctgagcgaacacggcgaatatgcctattcccgcgtcagtaacccgacccgccacgcctatgaaacactgctggccgatgtcgaggaaggtacttacgccaccgcgaccgcctccggtgtggcggctgcggcactggtgctgaatatcttcccgcagggctcccatattattgcgatgaaaggcgtgtacggcgggacattccgtctgtttgagcgcgtggcaaaagagaactgcggccacgagttcgattatgttgatctcaatgatttagccgcagtacgcagcaaaatcaaagacaatacccgcatgatctggatagaaagcccgaccaatccgttactggaactggttgatattgaagccatctgcggactggccagagaacacaatatcgtaacctgcatcgataacaccttcgcgacaccgtggaaccagaagcccctgaccatgggtgcggatctgatcatggtctcctccagtaaatatatcggtggtcactctgacttgatcggcggcgcggtgatcaccaaccgtgacgatctcgcggaaagactgaatttcctgaaaaccaccaccggcgcgattgcctctccgtttgatgcttatctcgctctgcgcggcctgaaaaccctggcactgcggatggcggcacaatgcagcaatgcacaggccgtggcggaatttctgtccggtcacgacaagattgaaaaagtattttatccgggcctgaaagatcaccctcagtacgaattatgcaaaaaacagatgcgcaccggcggtgctgtggtcactattcagctgaaaggcggcctcgcagaaaccgaagcatttgtgaaaaaactgcgctattttgtgctcgctgaatcgctgggcggtgtggaaagcatggtgaatcactccgcgaccatgtcccacggctccatgacccgcgaagagcgcgaatccatcggtgtttttgacagcacactgcgtttgtctgtcggcatcgaagatatcggcgatttactggctgatttacagcaggctctggcctgacacagcatcactaccacaataataaaagagaaagcgtatgcaggactatggtatctggacggtcattaccccggtcgtcacaattattctggccatctgtacccgtcaggtgattttatcactgctgatcgggatacttgtcggctttactgttattcatgatcacaacctcttactggggatccgcgcgaccctcgaagggattattgatgtctttaaatcatcaggaaacgccaaaaccatcatctttatgctgatgattggcgggattatgcggctggtcgtggtgaccggcggtgtacgggcgcttgtccgcctgctgaccaacaaaacgcagatcatcaaaggccgcaaaggtgttcagctgctggcggtgattatcacgtccctgatttttatcgaaagctcgattaaccagctggtttccggtgcttccaccaaagcgctggcaaaaaaatacggcgtgccgccggagaaaatgtcttacatcatccagaccgcctgtgtgtctgtctgttcttccgccatgatcaacggctggggtgcggcaatgatgggcgttatcggtgtgcagatctctcaggggctgatcaccggcgaaccgtttgatatcctggcacattccatggtttacaacatcatggcctggttctcactcgccagcattctgttctatatcttcagtaatgtctcctggggaccgatgcgcaaagcagaaatgcgtgcgcaggcactcatcagctctgcggatgttatcaccggtacaccggaagaaacgcacgacgagccggaagatgataaagacattattgatcatccaaactgtcatacgtcactgaacttctttatcccgatcctctccaccattctgatggtgccggtcgcgctgtatatcaccggtgacggcgagttcagcaaaggcagtggttccacctcggtttactggggcgtaatgttcgggacggcggtgtcatttgtctggttcctggcgcgccgcgtgatgaatgtcgataccttctttaaagagctctatatcggctatgccaatatgattaaaatcagctcggtgatgatcctcgccttcctgatgggctctgtctcttccgaccttaacaccggtgcctatattgcccaggtgacatcaggggttatcgcggcgggcttctctgtcggctttatcttcctgatcagtgccattatgtcactggcgaccggcacctcctggggtacattcgccatcatgatcccgattggtgtgcagctgggtctgtctgtcggtatgccgccggaatatatgattggtgcggctatcgccgggtctatctttggtgatatgacctcccctatctccagtgatgcgatcgtggcatcgatggcgacagactgtgaccatattgagcatatccgtacccagatgccgtatgcggtattaaccgcgagttttgcgctggccgtctatctctggttaggattcacctactgagtatgactgcgaattcaataaggaaatgatatgtcttcttctgtaaacactgccggggcaacccggctgcaacagacactggcgcagttcagtaagcttaatctgctcagcggtgtcacgccgctgaataaactgaataatctctcccgcctgctgggacgggagatttacatcaaacgtgatgatctgacaccgctggcggcaggcggcaacaagctgcgcaaactggaattcctgatggcggatgccctggaaaaaggcgcacagtttattgtcactgccggagccattcagtccaaccacgtccgccagacagcggctgttgcggcaatgtacggcctgaaatgtgtggcgctgctggaaaacccgatcggcagtcaggaagccaattttctgaataacggcaacaagctgctgacggatttatttggcacacactgtgtgatgtgtgatgccctgactgacccggatgcgcagatgcaggcactgatcaaccatatgcagctcagtgatgcgtatatcgtgccggtcggcggctccaatatgctgggttccctcggctatgcggagtgcgccatggaaatcgtgcagcagacaccggaaggcacagaattcggtgctgtcgtggtcgcctccggcagcgccggaacacacgccgggctgtctgccggattacagctggtgatgccgcagaccccggttatcggtgtcaccgtatcgcgggtatatgctgaccaggcgccgaaagtggttaaactgcaaaacgaactggcacagctgtttgatattgaaacaccggcaccgattgtgctgtgggacagctattttgccccggaatacggcatgccgaatgccggcgggctggaagccattgaactgctggcgcgtcacgaaggtattttgctggatccggtttacaccggtaaagccatggccgggctgattgaccaggttcgcagacacccggaagatacttcaccacttctgtttgtgcacaccggcggtgccgccggactgttcgcttatcaggaagtgagcgcagcaatataaagctgtccgccataatattataatttacagataacatctgacagataccggcaatatcccctgttccggtatctgttatttcccgcctctctgataatacctctcatttccggaaaaaatcacacatcaaattccgatgtaaatcattattcaggccgataaaaaatcatttcctgtgttcttttttaaaaaaaatacgcgtgtgagatgtaagtaaataatgcatttcctccccgtttttctttcatttattattactcaacctattgatatttaaatcattacttactattcattttgttcacatccggtgaaaaagaaataggataaaataaatacaataaaaatacacataaaaatcaaaagattaaatccaatactaacagcgcaatagtttgaaacatcagattacacagagatacaccgcagggtattctcaatacattatttcgatatactcattctgtgagttattcagagacactcatatatctataaattaaaccagacaaccagtaagcagcagaaaaaataatcttccactccggacaatgaaaattgtatttatcattgccagaattatttctgcctttattcattattgtttcgcataaaacaccacgatttcatttttattcagctgacactgaataataaaaaactcatttaaataaggtttaagatgaaaaaatctttaattggtaaatcattaatttctgcattacttgccggtactgctatgagtgcatccgcagttgatcagacaggtacaatttcctttaaaggctttatttataatgccacctgttcgattgatcttaacgatactaactctcctaatgttgatgtgttaatgggtcgttatccgaccagtgcatttacagaaaccggcactatggttggcggaaaagatggctacggtgaactgaatatttcattaacagactgcccggatcagggaaaagtaaaattacagttacatggtaagccaaaagatggtgataacgagctgttagaattagataacccgaacgcaagtacaacggctaaaaatattgctgtccttatatttgagaatggtgataccaataatgaccctgttgtgattgatggctcaaaaacagaggaatataacgtatcttccagcgcatcatggaagggaagttataccgcatactactacagtaccgctgacgacgttgaagccggccaggcggatgcaacgctgaattatacgctctcatataattaatatttatgcgcagatgaaatactctgcgcgccctcactataataaaataaccaaggcttaatcatgttcactaaaacaaatattctctctgcttgtgcattacttcttttggtatcagaaagctatgccggttttggtttagaaacaacccgcgttatttatcatgaaaaaaataacagcgagggtgttgttgcctttaataccgacaaaggcagaaattatcttttgcagtcatgggttgaagataaagcaggaaatgtcagccctgattttgtttcaacgccgccactcgtcaagttacgggctgaaaaaaagaatacattacaggtcacaaaagtagcgtcattaccggctgacagagaatccctttactggctgaatgttaaatttgtggcgccgagtgaggaaggccaggaaaacgttctgcgctattcgatgaccaaccgaataaagattctttaccgcccggcggctctcgataacagccgggatattgagacctatgctgacaagttagactggtctgtttcaggtaaccgccttacggttaataacagcacaccttattatgtgaatgtttcgaaaataaccgtcaacaaccaggaagtaaaactaccttccggatatatatcgccaaaatcggtggaaacaataactgtcccgcaggcaattaaagcacctgcaaatgtaaaactgacatacataaatgattacggtaaagccgttgaattaagttattctgctaaataacagatgataatgatgatgaaaaaatatcataataaaaaccattttatgtcattatccgtgatgcctgtccttatggcagggacatctttctccgttatggccgatgattattatccggccagtttatttaacattcccggcagtaactcacaactgactaatgaagatgtcaatgttttcaaagaaaatgataatgcgcccggaaaatacaaagtaactcttgttattaacaataataaaattaccacaaaagagattgattttgttttgaaaaaaaacaaagctggtaatgaaaagctcattccctgtttttcaagagaagaatgggaaaacacaggactcgattttccgtcatcagataatgatgataccggtggctgttttaatatcaatgacattgaatatacgcatggctatctcgaccttaacacccggatttatgcactgacaacaccacagtcatacattaataaagataaactggaagcattagagcaggaaaactgggataatggtatccctgcactttttgttaactatttattttcggcagtaaatcgtcaacacaatggcgaaacaaaagacagctattatggaaatatccagaccagagtcaatctgggtgcatggcgttatcagaattattccacctggatgaatgatgacaataataaaaacaaatggaaaaatatcagtaataccttatcgagaaacataaattcactgaaaagtgagtttactgtcggtaatctgtattcatcatcacagttatttgattctgttaaatttcgtggtattcgtctgacaacagacagaaccatggatccggtcagtaaaacaaactatgttccgtcaatttccggcatggcaaattcagaagccgttgtcactgttgttcagaatggtgaaattatcctgagacaaagtgttcctgccggtccgtttaatctcaccgaatattacccgatgagtaatggcggaaacctgtatgttaatgttaaagaaactgatggtagtgagaaaaatttcatcgttcctttctcttcaatttccacactggaaaagaaaggaaatatgcgttacagcatttccggcggaacctatgacagcaataacaaaggtaacggaaagaaaatcaatcaggcagaaatattttatggcctgaccgattttgtcaccgttttcggcggagcatttgttgccaaagattatcaatccggcggtatcggtgctgcatttaactttggtgcttttggtgcaatcacagccgatatcctgcatgcaaaagcaactcttaatcacgataaagcctctgccgggaatgcgtttcgcgttaactactcgaagagaatagaagcaacaaataccagcgtatccctggtgggttaccgtcactttgatgctaaattttatcgtttcgaggatgcaatgtcatatgatgaaaaccggaacgaccataataaacttaaaaatgaatacactttatcactgaatcagcctgttttttccggcaattcatcgcttaatctgtcgactgttatttatgaatatacatccggtaaaagacaaaaatcctataatgccgggttcaacagctcatttaacaaaatgaactacggtatatattataattattatcagggcacaagaactgataatggtaaaaataatacctataatgtcagtatgaaccttaatattccgctcaatattaaagataataccatctgggcaaattataatatttcttccgatgtcgatcatcagacgttacagactgccgggctcagcgggaattatggtgagaaccaacaaggcagctgggatatttatcagagtcagggtaataaaggcaccgggaattcaggcggtctgagtagttcctatcgctcacaatatgcgtctgttaatgccggttattcatacagtaaaaataataaaaatctcagctatggtatgaatggttcattgctggccacacaatatggcgtagttaccgctcccgcattgcagaataccaatgcactggtactgaccaaagatactgccggtgtgggtatcattaacggtcagtctgctcagacaaataattctggccttgctgttgtttccggtatgacgccataccggaaaaataatattgtgattgatactcagaccatccccggtgataccgagatcgaaaataatattattaacgatattgttccgacaaaaggcgcgctgattctggccgatttcaatgtgaagaaaggctacaaactgctgatcacactgaaaacacctgataataaagaaataccgttaggcgcaaaagcaacgatgggtggtgatactgaatacctggtatctaattttaatacgctctatttcattgcggataaagaaaaaggtgatatccgcgtgacctggaagcaggacggaaatatgcagcaatgcattatccggtatgacattaccggcactttacccacgaacggaatatatattacaaagctgaattgtcagcgggagatttgatgaaatactgtcacctgataaaaaaaaccagacatctgatattatctctgataattaccgcaggcggattaggtacggccggccatgcttatgcactcgaggactgtatcagaggcggaaatcagaaccattccacaatgacgtcaaccatcaatctgcgtcttaccggcagtataaagcagaatcaggaagtcggccgcttcacatttgtccgtgaaggcggtatcggcggcgtggcagactgcggaccggatgccggtattcacggctataccagctacagtgaaggcagtggtattgtcgccaagcattatggtgatattgacggctatcctgcatatcatatttatccgggcggagatcggaattttgtttatgttctgatcgataacagaaccggtatgcattttcaaaaccagccgggaagtaatattccggttccggcaggtccgctcctgccgcttgacttaacagttattatttatgccgcaaaagataatccggatacgctttctttaaccggcggagcatatattggtactgtcttaattcaggcatataaccccggcggcggcacaacagcggtaggatacagttacagactgaaaggcaagattgaaagcgcgccatcatcatgttcgctggaaaattctgacctggaatttaaattaccccgggcaccggtcaatgccttttcgtccaaaggatttccggacggtaattataaagctgaagataatttatttatttcatgtaacggcgatctgtctgcccatatgaaattaatggcggctaaaacagaaaattataacggaaaaaagtccgttatcgttcctgatgatgaaggtaataataatgcgtccggtgtcggttttgttgtcacatcaccgatgaataatgatgccgtactggttaatcaggagtttgttaaaatcgcggacttacaggacggaaaaacacgtgttccgcttgttgctgaatattaccgctatggcgattccgttaaacccggcaggctggaagcaaacacacaatttattctgcagtttgactgatacagcagccgtccggatctcccggacggctgctgctgttcagctgataccggtgcatccccgccatgccatcggtactgtggcaagattatagagcggcgtacccagcaggtagtggtcatacaccgtcagccccggcgttttatctttttccatcgcgtaatattcaacgggcagaataaacgagagtaataacagcgagataccggcattacggatagcacggcgcggcaacgcacggctcagcaggtgaaccaccgcgaaatacgccacagaaaccacgataaaaaacagtacgataccactgttttcagacaggaaatcaccggctgataacggatagccctgatggagcagctcaggaaggttcgtcagatattcagcgcccgcctcgcggcggaaaagcgcagaggcagataaattcagcccccacaaaatggtcagcaggccaacaactattttgcccgcggtatagcggcagagatacacattcgccagcagcaataatgtgcccatcaccgtaattttcacattgtactccgcccccggtccgccggataacaccgccggtgccagagcaatcagcacaatcagtaaaacagaagaaaacagacgcataaattaacttttaaataacataaacaagcgggttgcagtaaaccattaacaacctgataaaacaagtgccggagagaaagaaaaacgcggcctccggaacggagaccgcgctgtgacgtctgtcagtgagatttgccctgctcgattccgatgcctatctgagagcggataaactgcgcctcaaagcggctgcgttcttcctgaccctgtgcagagttatccgtcacagacaccagccaggccgcaataaaggcagcaaacattgagaaaagtgccggatattcatacggataaatcgctttttcgtgcccgagaatattgacccagatagtcggtcccaggatcatcaggatcacagcggttaataatcccagccagcctccggccagtgcaccgcgtgtggtcaggcgtttccagtacatcgagagaagaatgatcgggaagttacagctcgccgcaatagagaaagccagtcccaccataaaggcgatgttttgtttttcaaacagcacacccagcccgatagcgacaatcccgagaataatcaccgtcactttggagacttttaattcatcccgctcattggctttgccgtctttgatagcacaggcgtacaggtcatgggaaaccgcagaagcgcccgccagggtcagaccggcaaccaccgccagaatggtcgcgaatgccacggcagaaataaagccgaggaacagattaccaccgaccgcatccgccagatgcaccgccgccatgttggtgccgccgatcagtgcccccgccgcatctttaaataccgggttcgggctgaccaacaaaatagcgccgaagccgataataaaggtcaggatatagaagtaaccaatgaatccggtggcatagaacacactcttacgcgcttctttggcatcactgaccgtgaagaaacgcatgataatatgcggtagcccggcggtaccgaacatcagcgccagccccagcgataatgcggagatcggatctgataccaggccgcccgggctcataatcgccaatccgtttttatgtaccgcaaccgcgtctttaaacagggtgttaaagttgaaatctacagctttcatcaccatcagtgccataaagctggcaccggcgagtaacagaaccgctttgataatctgcacccaggtcgttgccagcatgccgccgaacaggacataaaacaccatcaggatgccgaccagcacaaccgccacgatatagttgagcccgaataacagctcaatcagcttaccggccccgaccatctgcgctatcagatacagcgccaccaccaccagcgaaccgctggcagacagcacacgaatcggcctggctttcagacggtaagaaaccacatccgcaaaggtgtagcgcccgaggttacgcagacgttccgcaatcaggaacaggatcaccggccagccgatcaggaaaccgatggagtagatcaggccgtcataaccggaggtgtaaaccagtgcggagatcccgaggaaggaggcggcagacataaagtcaccggcgatcgccagcccgttctgaaacccggtaatttttcccccggcggtgtaatactctgcgcgggaacgtgtccgttttgccgcccagtaagtgatgtacagtgtcaggccgacaaaaaccaggaacataataatggcctgatagtttaccggctggcgctccaccggcccgctgatggcatccgcatgactgaccagcggaaacagcagggataacagaagagcagaaaggcgcgttttcattgtttcaccccgctgatgatttcggcggtcagacggtcaaattccccgtttgcacggatggtataaataccggtcaggacaaacgcactgacaatcagcccgacgccgacagggatcccgcgggtaatcgtcagaccttcgccgagtggcgtgcccagccattgcggatcaaatgcaatcagaataataaagctgacatacagcacaagtgtgatagcggacaatgtccatgagaaccgactgcgctttctgaccagttcctgaaagcgagggtcattctccacctgctgataaatggatgcgctcattgaggatactcctctgtttttgttatccggagtgtcagtgccgcgtaacacggcactgactgaggttagcgtgctagttcattttgatggcctgcttttcttcgagcagtttttcgaccacacccgggtcggccagtgttgatacatcacccagattaccggtatcaccggcggcgattttacggaggatacggcgcataattttaccggatcgcgttttcggcagagagtcggtccagtgcagaatatccggggtggcaatcgggccgatttctttacggacccagttcctcacttccgcatacagctctggtgtcggctcctcgccgtgattgagtgtgacataggcataaatagcctgccctttgatactgtgcgggatcccgaccacggccgcttcggcaattttcgggtgtgaaaccagtgcggattccacttcggcggtaccgaggcggtgcccggagatattcagcacatcatccacccgcccggtgatccagtaatagccgtcttcatcacggcgggtaccgtccccggcaaaatacatacctttaaaggcggaaaaataggtctgttcaaaacgttcatgatcaccgaacagagtacgggcctggcccggccaggagtcgaggatcaccagattcccctcggtttcgccgtccagaatttcaccctggttatccaccagcgcaggctgaacaccaaagaacgggacggtcgcggagcccggtttcagttcaatcgcccccggcatcgcacctatcatgcaggcaccggtttcggtctgccaccaggtatcgacaatcgggcagcggctgtcaccgatagttttgtaataccactcccaggcttccgggttaatcggctcgccgactgatcccataatgcgcagtgatttgcgggaggtgtcttcaatcgcactgaggccttcagccatcagggcgcggatagcggtcggtgcggtatacaggatattgacctgatgtttgtcgacaatctggcacatccggttgaccttcggatggttcggtacgccttcaaacatcagcgtgatggccccgttggagagcgggccgtaaaccaggtaggtgtgtccggttacccagccgacatccgctgtacaccagaacacttcatcaccatgataatcaaagatatatttaaatgtcagagtggcataaaccaggtaaccgccggtggtgtgcagcacgcctttcggcttgccggttgagccggaggtatagaggataaacagcggatcttccgcattcatctcctgcggcgggcagtccgcactgacaccgctgacagcgtcatgccaccagatatcacgcccttcctgccactccaccggattgccggtgcggcggaaaacaatcacactgctgacggtggtcacgcccgggtttttcaggccgtcatccacatttttcttcagcgggatagtgcgcccggcgcgcagaccttcatctgccgtaatcaccatttttgccccggaatcaataacacggccggacaccgcctccggtgagaacccggcaaaaatcaccgagtgcaccgcaccgatacgggcacaggccagcatggcaaccatcgcttccggtaccatcggcatataaatcgcaaccacatcacctttgcggatcccctgctgtttcaggacattggcaaactggcagacatcatgatgcagttcacggtaagtgagtgtgcgggactcatccgggctgtcaccttcccagatcaccgccggtttatcaccacgctccgccagatgccggtcaagacagttggcactgagattcagtgtgccgtcctcaaaccacttaatactgacatggcccggatcaaaagaggtgtttttcacccgcgtatagggctttatccagtctacaatctgacctttctcacgccagtagctgtcgggatcctcaacagaccgctgatactcgtccagatactgctgatgattgattagcgcgttttctgcaattgcttcgggtacaggatatttcgttatttttgtcatgatgcatctcctttcaattgttaatgctatgtcaaaatcacgttaaataaagttacctttccgcctttgtttcttttttgcgctaaagatcacggattgaaaaagggggtattcacagcgttatcatttgatgcgaaaaccaccggcgatataaaaaatcacctgttacataaaaaacagcacatgacatcagatgagaagcgccaactaaaatatttaactaaaataagacagtaaactaacaaataaaaagaatccgcacagatcgcacagatctgataatcgttttcattatcatctgtttcattataatgtctgcctgttcacacacggtgtgagcggttcggtcaattactggagttataattatgagctatgtattacctgcattaccgtacgcttatgatgcgttagaaccgcatttcgataaaatgacaatggaaattcaccataccaaacatcatcagacgtatgtgaataacaccaacaccgcgctggaagccttccctgagatggcaaatctggatatcgacgatctgatcgcacagctcgataaattcccggcggacaaacgtacctttatccgcaacaacgccggtggtcattccaaccacagcatgttctggaaaggcctgaaaaccggcaccacattacagggcgacctgaaagcagcgattgagcgcgatttcggcagcgttgaggcgtttcaggctgagtttgaaaaagccgccgcaacccgtttcggttccggctgggcttggctggtgctgaaagacggcaaactggctgtggtttcaaccgccaaccaggacagcccgctgatgggtgaagcgatttccggtacttccggttatccgatcatcggtctggatgtgtgggaacacgcctattatctgaagttccagaaccgccgtccggattacatcaaagcattctggtctgtggtgaactgggatgaggcagcagcgcgtttcgcttctgcaaaataagtcctgaaatatgtgcggacgctgtccgcacatattcttctttcccgctttcgattatgatatccgtctcactcaatacggaggcggcatggcatacacacctttagttttcaccggtcccgtcagggatacagcccgctgcgggcgcagcgcaattgaaaagcgtcagaccgaaggcgtgattgccctcagtgccaccggactcgccggtgacgagcaggcggaaaaagcctttcacggcggccctgaccgtgcgttgtgtcactatccccgcgaacactacgactactggaaaatgatgtatccggagattgaggatcgctttgtcgcgccgttcttcggggaaaatatatccaccctcggtatgacagaagaaaccgtattcatcggggatatttatcagtggggcagcgccgtgattcaggtcacccagccgcgctcaccgtgctacaaactgaatccgctgacagatgtgtctgattttgcacaggtgatgcaggattgcggccgtaccggctggctgtaccgtgtcgtcgggaaaggggatgtcagcagtgatcagccgctgaaactgctgacccgcaccagcgcggtgtctgtcagggaagccgctgccatcgcttttcatctgccgtttgatgaaacagaataccgttatctgttacaggcatccggactttccgccagctggacactgaccatgcagcgccgtctgatgaccggtaaaatcgaggattttaaccgccggttattcggctccgccgcagccgtgtaagaatatgtaatcccgggttctccctgctttaaacccgttccggaatgtgtgattatcatactcgtttcacgatgaccgctgctgaccccgcagcacacacagacgaccttttaaacaggagacacggatgaaatacctgataatgctgctgagcctggcagcgctttcactgcccgccgccgcggcagatcagaacagtgcggatgagctggaaatctttacggataatgcagaaaactgcatccattttgccggtgaatgggatgtgtccctgccggcagatcagaaaaaagatatcaaaaaagcactggatgaaacctgtcctccggccaaagagcagcaaaaagtcttgcgtgaaaagtaccgcaatgacccggagatgctcgcaaaaattaatgaatttgacctcggccagtaacatccgccgtaaaaaaagcccttccggtctgcaccggaagggctttttgatctgatagtgtgatatctcaggcgaaaatggttttctctgccgggatcaccagcagtgcatcctgccagcctctgagagtcagagccgtcagagcagataatccttcatagaacgggctgccgcatttttcctgcatccgcgccagataaaagcgtgcccacggcagaaggtgttccgccagcagtgaattcagggcatccggacgattttccgccgtccaggccgccatcatcagtaacaggccgatgtgatcttccggctcattctgcgacagcacaatatccacctgatgtgcacgcatccactcacgcagggcaacagtggaatccccgaacagcacctgttctttatccagccagacagagccccacggcgatgcgggcagtgcctgcgggccgataaacagccgctgataggcctgcgctaaagtttcctcaccggtgacagtcagacccagtttctgtgcggcggcctgcttttgcgcatcattaccgtacggccattccgccacccactccccggaagagagcagttccgttatctgtacgatttctgacggcgggtagtaaaatgccgccccgagaatacgggccgttaaggcaacatcactgacagcttgctcactcataactcaggactctcacaataaaatatccgcgtatcctgccacgatttccgtccggaaaacagtaacaggatacgcgctgattgtatcaggacagataggccataccggctgtcatgtgcagtccgtagaaaataccgcggccgataatttccccggataacaccagaacaaaaccaatcagcatcataatcaccggcggatttgtccgtttcaccagcggcaggatccagcaggtcagacccagcgccagcagaaccagacgccagcccatatacaggccgaattccggtaccagcgcggaagcgctctgtacggaactgcggataaaggccagatcaaacgcctgtgacgtcactgcgaccgcactcgccaccaacgcaacgatacccaccagcggcagccagctgatgcagcgcaggtcaaacccggcaatccgcagcagcagagcagccagtaccggcccgcccagcagagctgtcagcacaaagtgaaccgtggtgtacggggtataccaggtcggcaccgtggcaatctggtaaacctgcggaatggcgtaaataaagaccaccgcgagaaccattaccaccagcagccagagcttaccgagcgccgccggcattttgttcagtaccgccagcagccagtaaaaaccaccggcagcgaagaagaccgaaccggccgcaatttcattactgagcgatgaactgccgaggcggttaaacgcattaaacgcacgcagcggcgtgcccatgtgcatcatggagagcaggaaacccacgcccatcagcacccacaggccgaacatgctgtaatgcactttacggttcagttccggtgacagttttccggacagcagcactgccgccatcacaataaatgcccctgccacactctgcccgatggtggtaaaaaacatcagcggccattcatgaattcccgatcccatgttatacctcctccgggttcgccagatggcctgtggtatccccgacaggacggctgttggcattcagttttaaaacgatattcggatgtgtgtattccgcagacggcagcggcgcgatttccgccagtgtgccgtatttggcccgcagctcctcaatcggccccatatccagtgcccgcagcggacaggattcaacacaaatcggctttttaccttccgcaacgcgctcatagcagccgtcacatttggtcatgtggcctttgacttcatcaaactgcggtgcaccgtacgggcacgccatatgacagtaacggcaaccgatacacacttcctcattcaccaccacaaagccgtcttcccgcttgtgcattgcaccgctcgggcagactttggcacaggccggatcatcacagtggttacaggagatagagagatagtaagcaaacacattctgctgatacacaccatcctgctctgtccagtcgccgcccgcatattcatagatacggcggaaattcacttccggagataagtttttaaagtctttacaggccagctcgcaggttttgcagccggtgcagcgacttgaatcaatgtagaaaccatattgcgttgacataaatcgcttcctcaggccttaacgacttcaaccaggttggaatgggacggattccctttcgccagcggcgacgggcgctgagtggttaacacgttaatgctgcccgcgtgatcgatgcgatcaccgtccgggctgtaccatgcaccttcacccagaccgacaacgcccggcagaatacgcggtgtgactttcacattgacgcgcacttccccgcgatcgttgaagaccttcacattatcgccgtgcgcaatcccgcgtttcgcggcatcaacagggttaatccacagttcctgcggacaggcggctttcagcacatcaacgttgccgtaagtggagtgcgtccgggatttgtagtggaaaccggtcatctgtaacgggtatttttcctgaagcggatcaccggcatgctcaaagcctgcggaataaaccggcagcggatggatttcatccccttcgttcagttcccaggtatcacggagttccgccagctgcgcggaatagatctcgattttacctgacggcgtggtcagcgggtttgcctgcgggtcgctgcggaaatcgcggtatgccacatggtgtccctgcgggtctcgttttttgaaaataccctgcttgcggaattcatcaaactccggcagttccggcagtgcagcgcgggactgctcatacaggtgacgcagccactcttcctgggtacggccttcggtaaactgatcaccgactcccatccgtttggcgatttcgctggtcatgtcatagatattgcggctttcaaagcgcggttcgatcgcctgatcggcaaaaatcacataccccatgttaccggcggaggcatccatgcagaaatccatctgttcggaagcggtacagtccggcagcaggatatccgcatatttggcggaagaggtcaggtggttatcgatcaccacaatcatctcacacttgctctcatcctgaaggatgtcatgagtgcggttgatttcggagtgctggttcaccagacagttaccggcatagttccagaccattttgatcggcacatccagtttgtctttaccgcgcacaccatcgcgggtggcagtcatctcttcgccgcgcagaatggcatctgtccacataaacatggagatactggttttcaccgggttggtcagggtcggcatacggacaaacgggattgcgtaagagccttcacgcgcaccggtgttaccgccgttaatccctacgttaccggtcagaatagagagcatggcaatggcacgggatgcggtttcgccgtttgagcggcgctgcgggccccagccctgagtgatatacgccggtttggcagtaccgatttcccgcgccagtttcacaatccgcgccgccggaataccggtgattttggctgcccactccggggttttcgccacgccgtccggcccttcacctaaaatatacgctttatagtggccgttggccggtgcaccggcaggcatggtggtttcgtcataaccgacacaatatttgtcaaggaacggcttatccaccaggtcttctttgatcatcacatacgccagcgcgctgaccagtgcggcatccgtacccggacggatcgggatccattcatcctcgcgccctgcaccggtatcggtataacgcggatcgatgataatcatgcgggcatttgatttttcgcgtgcctgctcaacataataggtcacaccgccgccgctcatgcgggtttcgcccgggttgttaccgaacaaaaccaccagcttgctgttttcaatatctgacgggctgttaccgtccgcccagccgccgtaggtgtaattcagaccggctgcaatctgcgcggtactgtagtcaccgtagtgattcagataaccgccgcagcagttcatcagacgggcaatcagtgttgctcccggcggccaggatttggtcatggtgccgccgagggtgccggtgccgtagttaagatagatagattcgttgccgtaatcgcggatcaggcgtttcatggtaccggcgatagtatcaaacgcctcttcccaggtgatacgctcgaatttgttctcaccgcgtttacccacacgtttcatcgggtatttcaggcgatccgggttgtacacccggcggcgcatggaacggccgcgcaggcaggcgcgtacctgatgcagatcttcgtagacatcatcaccggtattgtcggtttcaacatatctgatttcgccgtcaaccacatgcatccgtaacggacagcggctgccgcagttaaccgtacaggcactccagaccactttctcatcagaagccgccgcaggtgccggggtagtttcagcggcagacgccgcatggctgaacgggagggataacccgcccgctgcaactgccagaccgccggccgcaccggaggctttgacaaacccgcgtcgcgtcagcggcgcagtgaacaacgccgtttctttcatctttgtcatatacattgctcgcttaattgattttgtaatcgttattattattgttgttgccggataacggcttattgtcagattgcgactggtaaccattcgcaataaatcatttgtaatacaataacctgcagttattaacctatagttattttacggttttacgattcagccgggttgttttgcatcaaaaaatgagtgcgtgaaaagcagattattgatcccgtcagtggcagacggcatccgctcatgggaaaatagtgaccagctcaatattatgatcaggaaaaggagttaacgttatcagacgcagcgcactcaactacctgataaacggcgaaaaaaccacaccgccgtcagtgaatgatcactgtgtcaggaagaaactcaaaaacagtcagtgtgataactgcgccgcctgctgcccggcagatgcggtcacattcggctatctcgacgtcaaaattgataatgaccgctgttttcagtgcggaaactgcctgtttgtctgcccgtctgatgctattgaacacatccctgtccgcgaacgcaactacaacaataacgggcaactggtgattgagaagaaagaaaccccggccagcgcggaagaactgctggtctggcaccggcagtaccatatccgcgggatgcagatagcagagccggaagttgataactggctgccggtactggcagcgctcaatctgcgcctgaaagccctcggcgaaccaatctggcagttgactatcatcccgccgccgccggtggataccggaaaacgttttgcgctgttccggcagaaaaccatcagtagcgggctgaataccggccgtgccagaaccggtctgaatgagcgaaaaaaactctggccggatgacagctggtttgatgtgcgcccggatacggaaaactgtattttatgtaccgcctgcgcggcagtgtgtcaggaaggggctatcactattgcggataatcagtttaccgtggataagacaaaatgcagcggctgcatgagctgccgtgacgtctgtttcccgaaagcgatcgatgtcataccgcaggcagaaaaaaacagtcagccggtccgctatgcttattttgatgctcattgcagcagctgccatctgccttttatgagctggcagccgggacagacattatgcccggtatgccgttcacgaaaagagaaaggctggctgtaacgacagagataaaaaaagcgccgaaaggcgctatttttatttttatatcatgtaattacagcggacgacgtacaaaaccaatcgcgtcgtgtactttatccagcgtgacctgtgcacgggcagaggctttctcagcaccctctttcattacacggttcagtaacacatcatcgttacggatttcgtgataacgggtctgtaactctgtcagcatgccggaaaccgcatccgccaccgcacctttcaggtgaccgtacatctggccttcaaattcagcttccagcgcagcaaccggtttgccggtcacaccagagagaatatccagcaggttggaaacacccggtttattttccaaatcataaatcacgcgtggcggctcttcagagtctgtcaccgcgcgtttgattttcttcgctgccgctttcggatcttccagcagggcgatcaggttgttacggttatcatcggatttcgacatttttttcgtcggatcctgtaacgccatcacacgggagccgccagccgggataaacggatccggcaccacaaacacatcaccgtaaatggcgttgaagcgctgcgcgatatcacggctcagctccagatgctgtttctggtcgataccgaccggcacctggttagtctgatacagcaggatatctgcggccatcagcaccggatagtcaaacagaccggcgttgatgttttcggcatgacgggcagatttatctttaaactgtgtcatgcggctcagttcgccgaaataggtgtagcagttcagtgcccagcccagttgtgcatgctgcggcacatgggactgaacaaacagcgtattttttgccggttccagaccacaggccatataaagcgacagtgtatccagtgtgcgtttgcgcagctccgccggatcctgacggacagtgatcgcgtgctggtcaacgatgcagtaaatgcagtcaaaatcatcctgcatttttacccactggcgcagtgcgcccatgtagttaccgatggtcagttcgccggaaggctgtgcgccgctgaatacaacgggtttgtgtgctttggtgttagttccgctcatgattatccttcctgatgagttaacggaggcagcccgagtgcaggcagcagacccgcaaagtcggacagtacgcaatccggattgctgtcagcaatcggaataccgtagttgtagccgtaggtcatgccgacacagggacattccgctgcccgtgccgccaggatgtcattgcgggagtccccgacaaacagcatctcttccttacgcagcccgaactcacccagcgtcaggtagagcggagccggatgcggcttcttatttttcacatcatccccgccgagcacgacagagaaaaatttatccagaccggtttcagccagcagcgacggaataaactgagacggtttgttggtcacgatcgccagatccagccctgcgtctgccatcacctgtaaggtttctgccacatgcggaaatgccggactgccggttttaacggtctcagcataaaaatcatcaaacagctgacggcatttcgcgtgcagtgcagcatcaggtttttcaccggttgcatgagtcagggcacgttccagtaacatatcaacgccgttaccgacccagacagaggccatttcccggcccgctttccggtagcccagtgcttccagtgcgcgatcagtcgcttccgccagtccctgaatactgtcagtcagtgtgccgtccaggtcaaatgcaacggctttaatccctgtgaattgctgtactgctgttttgtctgtcatgctgaaacctttgttaattctttacgcatatcatcaatcacggctttgtaatccggtttgccgaaaatcgcagagccggccacaaacatatccgcaccggcctgcgccactgccgcgatattttcagtcttaattccgccatcgacttccaggcggatatcacggccgctggcatcaatgcggcggcggacttcttccacttttttcagtgtttccggaataaaggactgaccaccgaagcccgggtttaccgacatcagcaggatcaaatccagtttatcaatcacataatcgaggtaactgagcggcgtggccgggttgaataccaggcccggtttacagccgcattcgcggataagctgaatggtgcgatcaacgtgctcgctcgcttccgcgtggaatgaaatgtaggttgctcccgctttggcgaagtccggcacaatgctgtccaccggtttcaccatcagatgcacatcaatcggcgcggtaataccgtaatcacgcagcgccttgcacaccatcggcccgatagtcaggttcgggacataatggttatccatcacgtcgaagtgaaccacatcgccgcctgcggcgagaactttcgcggtgtcttcccccagacgggcaaagtcagcagataaaatggacggagcaatcaaaaactctttcattcctgtttcctcttaataagacgccgccgggttcaacggcttactgtccgcggtaaagcgccagtaattcattcactttctggcggttaagtgtattgcggctgatagtgcggcgcactttgacaatatgtagttgcgcctgatgataccactcccgggtcagcggggtgtcatgattcgagatcagaaccggaattttgcgatccgacgaaagcatttgtgccagttgtgccagattctgctgctccggtaacccgaatccgctggtgtgatacgccgtaaaattggctgtcagtgataacggcgcataaggcggatcacaatagacgatatccccggtgcctgcattttccatgctggtcacataagactggcagacaaacagggcgttgcgggctttttccgcgaaccacagcagttcagcttccgggaaatagggtttgcggtagcgcccgaagggcacattaaaccggcctttggaattataacggcacaaaccgttataacaatggcggttcagatagagaaacagaatgctgcgctcgaaatgatccgtgctctgattaaactgttcccgcagcgcatagtactgtaattcatcattaaactgcggcgtgaacagcttgcgggactcatcgataaattcctgagtccgctgcttcaccatcgtgtagaggtggatcagatcactgttgatatccgccagcacatagcgcggataatctgtattgagaaaaaccgaccccgcgccgacaaagggctcaataagacaatcaccctccggcagatgccgttttatttcatctgccagagtgtattttccgccggcccacttcaaaaatgcgcgttgtttcttcatgctgtctgtaatcattgctcaaaaaggccagagccgccgattctgctctgtttcagacagcaaatcagcacctgacggaatccgtgtttattatttcatgtcctgatgcacttgctgcatctttctgacccacggttttttcccctgaatttcggcaggcagacgctcaacttcccgttttgcatccccgactgtcgggaaattaccgtacaccaggacgtaccacgattttccgttacgtgttgtctcataaacctgatagttggataacccgtgcttctgcgcaaaggctttcagcgtatccgcacggctcgcgctgctcagctgcagggtatagttcccggcaggggctttggcgatcgcggtgccgctttttgacggagccggtgccgcagtagccggtttggtggtttcacgcggtttggctggtgttgccgtggtggttttcaccggctgcggtttcacctgttgtaccggtttcttcggctcttccttcggagtgaccaccggcggcagattattcatattctgctgcgccgcattattaatacccacctgcgtatttccctgattcagggcatcgttaatatcccccgggatatccacgcgctggccggtgccggttgtctgtgacggcggctgtgcctgtgtcggcaggttattgatagcagggagattcacgccggtctgcccggtctgtgacggaaccggttcggttggctgtaactgtgttgcaccgtcattgctgccggtgccgagggtaatcgggcgctcgccgttctgtgcctgcggctgggcttccggttctgacggcgatttcagcgcggagcttatcgcgataatcagtaataccaggaccacaaccgccacgccgatcatcatctgctggcgggagacggcaaacttaggccgtgactgctgcgggcgcggacgcggattacggcgttcagggcgctccggtctgtcagatgcgtccggacggatagattcatcatccggctggctgaaaatctgtggttcttgcttttcgggtttaaagccgtccattttgccctcccatcagagcagaaactgtgtctttggatataacagaagagaactgacgcccggtgagtgcgtcataatgcgtagtgtaaccattttcccggcactcagcgagacagatatcaaaaaacttctgccgccgcttccgttacacggactgaatggcagccagcaccctgtcatgcgggatatccgcacggacaactgaccggccgattgtttccgggacaatcaggtgcagtttaccgccctgcacttttttatcccgcatcatgtgcggcagatacgcatccgccggcatggattccggtccgcgcaccggcagcccggcgcggataagcagcgcaatgacccgctctgtctcttccgggcggaaggtcccgagcagttcagccgtgcgtgcagccatcaccatccctgcggcgactgcctcgccgtgcagccagacaccgtagcccatttccgcctcaatggcgtggccgaatgtatggccgagattcagcagtgcgcgcagcccgctggtctctttttcatccgcagccaccacctctgctttcagttcacagcagcggcggatgcagtacgccatcgcctgcggctcaagtgccagcagacggtcgatattattttccagccagataaaaaaatcgtgatccagaataatgccgtatttgatgacttccgccagccctgacgccagttcacggcgcggcagggttttcaggcagtcgagatcaatcaccacactgaccggctgccagaaggcaccaatcatatttttacccagcggatggttcacgccggttttaccgccgacagatgaatccacctgagacagcagcgtggtcggcacctgaataaaacggacgccgcgctgatagctcgctgccgcaaatccggtcagatcaccgataacaccgccgcccagcgcaatcagcgtggtatcacgcccgtgattgttttccagcagcgcggtaaaaatacggtcaagggtggtcagggatttatactgctcgccgtccggcaaaatcacggaatccgcctgtacgccggcttgcgcaaggttatcggtcagtgtctgaaggtacagcggggcaagggtttcgttggtaactatcattgcacgctgaccggtggtcagcggcgcaaaggtgccggagagggaaaagagacccggagcaattgaaataggataagcacgctcacccagagtcacagtcactttttccatggcacctccgcatgttgccggtaaaatgaaattaactgttggtttctaacagttcaatgatttgatttgcaaccacttttgcactctgatcatcggtgtggatagtaatatccgcgatctcttcatacatcggattgcgttcatcggccagtttgaccaggacttcccggaccggctcatcgacctgtaacaacggacgctttttatcgcgctgtgtccgggccagttgtttttcaatattggtctcaaggtatacaaccacaccccgcgcagacaggcggttgcgggtctcccgtgacttgacggaacccccgccggtagccaggacgataccctgcttttcagtcagttcattgatgattttttcttcacgcaggcgaaaaccttcttcaccttcgacatcaaacacccagcccacatcggctccggtgcggcgttcaatttcctggtcggaatcaaagaattccatatttaattgctgagccagctgacgaccaatagtacttttgccggcacccatcgggccgacaagaaagatattgcgtttctctgccatgtttttggtataactaagaatattcgttaatgataacccgccccgctcacccgatcagcggcgggacctcaaatgaaacctcatgagtgaatctgcgtgagtaacctgaaattatctccgcacattctgcccgattgcaaccataccggcacgaaaccggaaagatacctcaggtgctgctgtgtgacgcctgtcgcaatccggcctctgaacatccgcacatactatcataacgcctgcgaaaaaccgcgccttatatttccgtgaatcctcctgaaaacaggagctgtacagaaacataaggcgcgatctgagaatcaggacgttgtccgtcaacggattaacggcatattttacggcggcagtgatttcatacctgctaaatttgctaactcttgtatgctaaatcgttgcaatcgtcaaatgtataacaccgcagaaccggtaaaaaaacccgttattctgcgcatataatccgtgaataatgatacaacatgctgatattgatacagttactaaatatcgatcaactgcggtgtaatgaatatcactaattcacggcggctgagtttatcgtattgatgagtaaaaagctttcccatcaatgggatcgacgataaatacggcactccggtcacctgtctgcctttatcctgctgaaaaatcccgccgaggatcagggtttccccgctgcggacaatcacctgtgtggtgatttcctgcttatcaatggaatactgctcgctgccgttctgcatcagcgctgcaccgggggcattacggctgatatgcagtgtcagacgtactttattatcccgcaggatctgcggtgtcacctccatccccagtaccgcctcgcggaactgtacctgtgaaccggactcatggttttgcgtggtgtacggaatttccgctccctgtttgatactggcgggatgctcgtgcgccgtggtcaggcgcgggctggcgacaatatccagctgctgttcctgctccagtgcgctcagttccatctccagcagatggccgccgagacgggcgatattaaaggtgaacgtgttatttccccgcgcctgatgcagctgcaggcggttgccggactctggtgacggcagcacggttccccactgcagccccagctcatgcagcccttcccgcgagccggacacaatatgcgccgtaatctgcacctgctgctgcggctgatccatctgtgccagccaggcttccgcccgcgacagcacatccggttgtgcttctataaagagggaatttgtcagcgggtcggcttccggcgctttattatctgtaaaccattccccgtgatgctgtttcagcagggccagcatgtccgccgcatccgcatattgcagggtaaatgtgcggctctgcccgctttccggtatcagcggcggggaatacatcacggggagttctgtcagcacggccggttcctcactgatgacgacaggctgaaaaagatcccgcggatgctgcccgccgggagccgctgccgcaagcagcagacaacaaccggtgatcagccgggcggctgattttgctttattcatcatcatgccattccttttccggatccggtgaatccgcccccggtaatgccagatgcagtgtcagctgcaacagcggcggggatgaggaggttccgggtgtcagcgggtgcagcgaaagccgggtgatcggcaactgagtcagctccccgctgagggtatcgagcagcgccgccagctcagggtaatgcgcctcaaaggtcagcacccagcgttccggctgttccggcggctcctgctgccagccggtcagcaacggcagcgcattttcgggcagtaaggtaaacagcggcgggatatccgggggcggcagaaccaccgtttccggcaccgcctgttctgacagtgctgtcagccgctgcaactgccggaaccgcatttccgtttccccggctgccggttgcagataaaaacaccagaacaccacaccggccgataaccagatcccggcagtcactccccactgcacgcgccggtactgcgcacagcgccatactgtgttcagattcatgaccggctcctcccggtcaccaatataaactgccggatcccggctgttttgtgatgctgcaggctgatcagcctgagcggcatcagccccggcggtgcccgctgtaataaaggatgagacgggacaatcacctgacggcggttcaccgacagggcatggcgcacactgctttctgtatcatgcttttgctgctctgcctgataatgcgccagccaggcatcttccggcagctgagcctgcaaaaaaaccagcaaatcccggtaacggcggttttcccgtgcagtttgctgctgccgcagattttccgtttccgcctgccgctgtagcgcacgctgacgggcaagttcagcccgctgcggcgcaagacggatttcccgatcatcaaatgcggcctgtaacaacgccagatgctgcacattcagtgaatgacgcagataaaccggcagcagtgcggataacagcacgccgcctgccatcagaaaccggaaaaccatccggcggcagatttgccgtttcagccgggagcgccaggcagtcagattcacccggtgtgtcatagccgctcctccccgcaaagcaccatccctgccgccgccgcgtagcccggcgggacatcatccgcttccgcattgcggtaacgccggcattcccgctgccatgcctgcggcagcagcgcagtatcatgcagacagcacagtgccgcctgtgactcatcaaaaccctgtgttttcagctctgtcagtaatgacggcagggtcaggtcagcccgtccgctcagtaccggctgcgtttcaccggcagtccagcaaagactgttcccctgacggaaaaccagccagtcctgtgcggccacccccctggcgcaggcaaaacagcgcagcgcacagggaataatgctgagtaccgtcagatccgcgcggagttccgccgccagcgacagccactgatcacggacagtacggtgcagcgccgtcagaataatatcgccggaaaaccaccggtaatcatagataagatcctgatgacgccccggaaatgtgcgcgccagccaggtactgatgaatcccctaatgatttttatcaaaatcattaagttaaggtagatacacatcttgtcatatgatcaaatggtttcgccaaaaatcaataatcagacaacaagatgtgcgaactcgatattttacacgactctctttaccaattctgccccgaattacacttaaaacgactcaacagcttaacgttggcttgccacgcattacttgactgtaaaactctcactcttaccgaacttggccgtaacctgccaaccaaagcgagaacaaaacataacatcaaacgaatcgaccgattgttaggtaatcgtcacctccacaaagagcgactcgctgtataccgttggcatgctagctttatctgttcgggcaatacgatgcccattgtacttgttgactggtctgatattcgtgagcaaaaacgacttatggtattgcgagcttcagtcgcactacacggtcgttctgttactctttatgagaaagcgttcccgctttcagagcaatgttcaaagaaagctcatgaccaatttctagccgaccttgcgagcattctaccgagtaacaccacaccgctcattgtcagtgatgctggctttaaagtgccatggtataaatccgttgagaagctgggttggtactggttaagtcgagtaagaggaaaagtacaatatgcagacctaggagcggaaaactggaaacctatcagcaacttacatgatatgtcatctagtcactcaaagactttaggctataagaggctgactaaaagcaatccaatctcatgccaaattctattgtataaatctcgctctaaaggccgaaaaaatcagcgctcgacacggactcattgtcaccacccgtcacctaaaatctactcagcgtcggcaaaggagccatgggttctagcaactaacttacctgttgaaattcgaacacccaaacaacttgttaatatctattcgaagcgaatgcagattgaagaaaccttccgagacttgaaaagtcctgcctacggactaggcctacgccatagccgaacgagcagctcagagcgttttgatatcatgctgctaatcgccctgatgcttcaactaacatgttggcttgcgggcgttcatgctcagaaacaaggttgggacaagcacttccaggctaacacagtcagaaatcgaaacgtactctcaacagttcgcttaggcatggaagttttgcggcattctggctacacaataacaagggaagactcactcgtggctgcaaccctgcttactcaaaatctattcacacatggttacgttttggggaaattatgaggggatctctcagtgctcagcatgtttgagtgctttactcgccgcgggttgagaaatatgtaaaacttcagccgcacgcgttaaggaaccacaagtcattacagcataaaagatatcgagatgtcttaatttcattccatgtagcctactgattatttatttctacggactattctaacgaataaagtataaataatcagatatactcgtcataattcaaattttggtttagttgtcacgagaattaattcgtaaacgtgcaagctaaatagattgactaggggaatatacggggtaagaaagcggctcggcatactgccctataataaattgttaggagaagtacgccgagtagtgtgtagctattaggtaaagtatgtaccaatttcaataaatattttaattaagatactgtttgaaatatcaacaataaaggcaccgaccataggaacgacaaggaaagctttatgtgatggtccaaatgcttttgtgactgtttgcatattcgcaattgctgttggtgttgctcccataccaaagccacagtgacccgcgctgatcacgacagcatcataatctttgcccatcattttgaaggtgacaaagcaggcaaatagcaccatgacaacagtttgtacagcaatgataattaatactggccctgccatgcttgccaattgaccaaattttaatgacattaacgccattgccaagaaaagcgataaagcaacgctacctaatacatcgacggtcggctcaaacacttcgtgtttaaatacatgagtcagtgtattacggataataataccgacaaataaacaccagacaaaagtaggcagttgcagaaaagtatctttaaacaatgcactgatatagccaccaacaacaatacagataatcagcattgaaatggtttcaataacgttatttgcattgatttttcttttgacgcttggttgctcaaaagcttcaacgatagtgtcgcgctcttgctcggttgttttaggaatagagacctttttcaaaagatgacgggcaacagggccgccaactaaaccacccaacactaatccaagtgttgcacaagccatcgctaattcaacggcgcctgttacaccatatttatcagcgagaatagggccccatgctccggcattaccatgaccacctgttagagtaattgaacctgcaattaagccaataaatggactttcattcatcatgacagccatactcatgccgacagtattttgaatggcgattaggatcgttactgcaatagttaatagaactaacggctttcctcctttaatcagtcgagaaaagtcagaacttagcccgatagaggaaaagaatgtgagcattaataaactttgcaatgaagcatcaaaagtaaacgaataacctgatgttttatcaataattaacagaacaattgcaacaataaagccaccaacgacggcttctggtatgtggtttttttgtaggaacggggtaaattttacgacaaacattcctatgagtagcgcgatacatgcgactaataatgtataactggcatctaggatcatttttttacctctattagtttaccagaattttcactataacaatttaacaatagtgaaaaatgaagttactttggttaactaatctttaacaatgagttttattagggtatccataacttttagttaatagggtcataattttagtgtgatcttaatcatgaaatattaaaaagattaaaataacaacaatggtatttaatgatgggtaaacctaaataccatgcgggatccgcactattttcggtgatagcaaaaaataaaaaagtataaataataaacaaaattataagagaaggagaacatgataagcgcaggccgagcaatttaaagaagtgtgatatacaacataaaacagcagcatgacctttctatatttcgttgcttatcgaagtgttaattttcgggtggattactctgtttgttgattaataacggagaaaaatatgattgctgtaatatttgaggtgcaaatacaacccgaccaacaaactcgctatttgactttagctgaggagttaagaccactattaagtcatgtagctggttttatttcaattgaacgttttcaaagtctagctacagaaggaaaaatgttatcgctatcttggtgggaaaacgaatacgcagttctgcaatggaaaaatcatgttttacatgcgaaagctcaacaagaagggcgagagtcaatatttgatttttacaaaattagtattgctcatattactcgcgaatattcatttaaaaaggacaaggataatgtttgatgttcacgttgttttagataatcaaataggacaattagcattactaggaaaaacattaggtaataaaggtattggattggaagggggagggatatttacggttggtgatgaatgccatgctcattttcttgttgaacaaggaaaggaagctaaaatagcgctagagcaagctggactgttagtacttgcgatccggacaccattaattcgtaagttaaaacaggaaaaaccgggggaacttggcgaaatagcacgagtattggcggagaataacattaatattttagtgcaatacagtgaccatgctaaccaactgatattaataacggacaatgatagtatggctgcatctgttacgctcccttgggcaataaagtgaacttgcgatggctaatttaatacgaaaagaggttacctttgagtcctcaatagccgcgataggggcggctatgtctgacatttcacgagttaaaatactcagtgctttgatggatgggcgagcttggacggccactgagctaagttctgtggcgaatatatcagcttcaacggcgagcagtcatttatctaaattattagattgccagctaatcacagtagtagctcaaggcaagcatcgttattttcggctagcaggaaaagatattgctgaattgatggaaagtatgatggggatctccttaaaccatggcgtacatgccaaagtttccacgccagtgcatttacgaaaagcacgtacttgctatgatcatttagctggcgaagttgccgttaagatctatgattccctttgtcaacagcaatggatcactgaaaatggttcaatgatcacattaagtggtattcaatattttcatgaaatgggaattgacgttccttccaaacattcacgtaaaatctgttgtgcgtgtttagattggagtgaacgccgtttccatttaggtgggtacgttggagccgcattattttcgctttatgaatctaaagggtggttaactcgacatcttggttaccgtgaagttaccatcacggaaaaaggttatgctgcttttaagacccactttcacatttaagttgtttttctaatccgcatatgatcaattcaaggccgaataagaaggctggctctgcaccttggtgatcaaataattcgatagcttgtcgtaataatggcggcatactatcagtagtaggtgtttccctttcttctttagcgacttgatgctcttgatcttccaatacgcaacctaaagtaaaatgccccacagcgctgagtgcatataatgcattctctagtgaaaaaccttgttggcataaaaaggctaattgattttcgagagtttcatactgtttttctgtaggccgtgtacctaaatgtacttttgctccatcgcgatgacttagtaaagcacatctaaaacttttagcgttattacgtaaaaaatattgccagctttccccttctaaagggcaaaagtgagtatggtgcctatctaacatctcaatggctaaggcgtcgagcaaagcccgcttattttttacatgccaatacaatgtaggctgctctacacctagcttctgggcgagtttacgggttgttaaaccttcgattccgacctcattaagcagctctaatgcgctgttaatcactttacttttatctaatctagacatcattaattcctaatttttgttgacactctatcattgatagagttattttaccactccctatcagtgatagagaaaagtgaaatgaatagttcgacaaagatcgcattggtaattacgttactcgatgccatggggattggccttatcatgccagtcttgccaacgttattacgtgaatttattgcttcggaagatatcgctaaccactttggcgtattgcttgcactttatgcgttaatgcaggttatctttgctccttggcttggaaaaatgtctgaccgatttggtcggcgcccagtgctgttgttgtcattaataggcgcatcgctggattacttattgctggctttttcaagtgcgctttggatgctgtatttaggccgtttgctttcagggatcacaggagctactggggctgtcgcggcatcggtcattgccgataccacctcagcttctcaacgcgtgaagtggttcggttggttaggggcaagttttgggcttggtttaatagcggggcctattattggtggttttgcaggagagatttcaccgcatagtcccttttttatcgctgcgttgctaaatattgtcactttccttgtggttatgttttggttccgtgaaaccaaaaatacacgtgataatacagataccgaagtaggggttgagacgcaatcgaattcggtatacatcactttatttaaaacgatgcccattttgttgattatttatttttcagcgcaattgataggccaaattcccgcaacggtgtgggtgctatttaccgaaaatcgttttggatggaatagcatgatggttggcttttcattagcgggtcttggtcttttacactcagtattccaagcctttgtggcaggaagaatagccactaaatggggcgaaaaaacggcagtactgctcggatttattgcagatagtagtgcatttgcctttttagcgtttatatctgaaggttggttagttttccctgttttaattttattggctggtggtgggatcgctttacctgcattacagggagtgatgtctatccaaacaaagagtcatcagcaaggtgctttacagggattattggtgagccttaccaatgcaaccggtgttattggcccattactgtttgctgttatttataatcattcactaccaatttgggatggctggatttggattattggtttagcgttttactgtattattatcctgctatcgatgaccttcatgttaacccctcaagctcaggggagtaaacaggagacaagtgcttagttatttcgtcaccaaatgatgttattccgcgaaatataatgaccctcttgataacccaagagggcattttttacgataaagaagatttagcttcaaataaaacctatctattttatttatctttcaagctcaataaaaagccgcggtaaatagcaataaattggccttttttatcggcaagctcttttaggtttttcgcatgtattgcgatatgcataaaccagccattgagtaagtttttaagcacatcatcatcataagctttaagttggttctcttggatcaatttgctgacaatggcgtttaccttaccagtaatgtattcaaggctaattttttcaagttcattccaaccaatgataggcatcacttcttggatagggataaggtttttattattatcaataatataatcaagataatgttcaaatatactttctaaggcagaccaaccatttgttaaatcagtttttgttgtgatgtaggcatcaatcataattaattgctgcttataacaggcactgagtaattgttttttatttttaaagtgatgataaaaggcacctttggtcaccaacgcttttcccgagatctcatctattgaaacagcttgatagcctttttcaacaaacaatattcgtgctgagttaaccagtgattgataggtactcttaaaattttcttgttgatgatttttattttccatgatagatttaaaataacataccgtcagtatgtttatggtatcatgatgatgtggtcgtgacaatcttaagaacatttaggttattttatgtatattgaacagcattctcgctatcaaaataaagctaataacatccaattaagatatgatgataagcagtttcatacaacggttatcaaagatgttctattatggattgaacataatttagatcagtctttactgcttgatgatgtggcgaataaagcgggttataccaagtggtattttcagcggctgttcaaaaaagtaacaggggtcacactggctagctatattcgtgctcgtcgtttgacgaaagcggctgttgagttgaggttgacgaaaaaaactatccttgagatcgcattaaaatatcaatttgattcccaacaatcttttacacgtcgatttaagtacatttttaaggttacaccaagttattatcggcgtaataaattatgggaattggaggcaatgcactgagagatcccctcataatttccccaaagcgtaaccatgtgtgaataaattttgagctagtagggttgcagccacgagtaagtcttcccttgttattgtgtagccagaatgccgcaaaacttccatgcctaagcgaactgttgagagtacgtttcgatttctgactgtgttagcctggaagtgcttgtcccaaccttgtttctgagcatgaacgcccgcaagccaacatgttagttgaagcatcagggcgattagcagcatgatatcaaaacgctctgagctgctcgttcggctatggcgtaggcctagtccgtaggcaggacttttcaagtctcggaaggtttcttcaatctgcattcgcttcgaatagatattaacaagttgtttgggtgttcgaatttcaacaggtaagttagttgctagaacccatggctcctttgccgacgctgagtagattttaggtgacgggtggtgacaatgagtccgtgtcgagcgctgattttttcggcctttagagcgagatttatacaatagaatttggcatgagattggattgcttttagtcagcctcttatagcctaaagtctttgagtgactagatgacatatcatgtaagttgctgataggtttccagttttccgctcctaggtctgcatattgtacttttcctcttactcgacttaaccagtaccaacccagcttctcaacggatttataccatggcactttaaagccagcatcactgacaatgagcggtgtggtgttactcggtagaatgctcgcaaggtcggctagaaattggtcatgagctttctttgaacattgctctgaaagcgggaacgctttctcataaagagtaacagaacgaccgtgtagtgcgactgaagctcgcaataccataagtcgtttttgctcacgaatatcagaccagtcaacaagtacaatgggcatcgtattgcccgaacagataaagctagcatgccaacggtatacagcgagtcgctctttgtggaggtgacgattacctaacaatcggtcgattcgtttgatgttatgttttgttctcgctttggttggcaggttacggccaagttcggtaagagtgagagttttacagtcaagtaatgcgtggcaagccaacgttaagctgttgagtcgttttaagtgtaattcggggcagaattggtaaagagagtcgtgtaaaatatcgagttcgcacatcttgttgtctgattattgatttttcgcgaaaccatttgatcatatgacaagatgtgtatccaccttaacttaatgatttttaccaaaatcattaggggattcatcagagccaggtatctatcagcggcaccaccgcagactgcgcgacacggctctccggcaggcggatctgctgctgaagacagagtgacaccggcagtgccgcccggcaatccggccgcccgcggatacgccgccgccatggcgccagtgcagccgcaaccgcagacaggccgggcacaccgttttcggctgattccgtttccggcagtgtcagcgtgataaaatcctcaaaacaccacctccggcgtatgcgccgcgccagtgctatcctgatctccccgtcctgaagtgaaattcccgccatccgtgaagcaatccgcataaattatccctgtattattgatatgagaaatacttttttctcttaattttcctgtggttacaaaatacgtattcaagaaacgcatgaacctttatactacagggtcgctgtttataaactgtccaccacacggctaacggaaattttcaggtgaagttcttaaagtatttattgatctttgttgtctgttgcatttttcttggagcagcatcgatatatggcatgtacaaatatgtcgaggctgacctgcccgatgtggccacactgaaagatgtcaaattacagacaccaatgcaggtctacagcgcggatggcgaactgattgcccagttcggtgaaaaacgccgtattccgctgacactcagccagatcccgccgatggtaaggaatgcctttatcgcgacggaggacagccgtttctatgaccaccacggaatcgacccgatcgggattttccgtgccgcttctgttgccatgacctccggtcgtgcctcacagggcgccagtaccatcacacagcagcttgcccgtaacttcttcctgagcccggaaaaaaccgttatccgtaaagtaaaggaagcgttcctggccatccgcatcgaacagatgctgaccaaagatgaaattctcgagctgtatctgaacaaaatttacctcggccagcgcgcttacggcgtgggggctgcggcttatgtctatttcggcaaaagccttgatcagctgactctcagtgagattgcggtgatcgccgggctgccgaaggcaccgtccacctttaacccgctttactccaaatcccgcgccctggcccgccgtaatgtggtgctgacgcggatgctggaagagaattacattacccgcgcccagtatgatgaagcgcgtaatgagccgatcgaagcccgttatcacgccccggaaattgatttttccgcgccgtatctggcagaaatggttcgtatggcaatgattgaaaagtacggtgaaaatgcctataccgatggttataaggtctacaccaccgttaaacgcaaagatcagctcagtgctgaagatgcggttcataccggtatcatcgactacgatatgcgccacggttaccggggagctcagcaggttttgtggccgcagaacagtgcggcatgggatacagagcagatcctgagcaaactgaaaacgttacaggtctacggcccgctcaatccgggtgttgtgctgagtgcggatgctaaccgtgcacaggtgatgctcaaagacggctccaccatcgacctgaccatggacagcatgcgctgggcgcgcaaatttatctctgatcgcgctatgggtccggcaccgcgtgcggtaaacggtgtggtgcatgccggtgagcagatctgggtgcgtcagaacaaagaccgctggatgctggcacagatcccggatgtcaactctgccctggtggcactcaatccaacggatggtgcggtgatcgcactggtcggcggctttgatttcgggctgagcaaattcaaccgtgtcacccagtctctgcgccaggtcggctccagcatcaaaccgttgctgtataccgccgcactggataaaggtctgacactcgcctccctgctcaatgacctgccgattgtccgtgcggacggcgctggtcctgactggcgaccgaaaaactcaccaccgcgctatgacggcccgatccgtctgcgtcaggggctgggacaatcgaagaacgtggtgatggtgcgggccatgcgggcaatgggcgtgaattatgccgccgattatctgctgcgcttcggcttcccggacagtaacattgtccggacagaatccatggcgctcggctcttcctcattcaccccgatgcagatggtgcgcggctatgccgtgatgaccaacggcggctatctggtcgacccgtattttatcagccggattgataacaccgaaggcaaagctctgtttaccgcagagccgaaaattgcctgtccgcagtgcaccaacatcccggtgatctacggcgaaggttcacatgacctggaaagcagcctgaacaaggatgctctggaaaacgacgtggcgaaatcagacagccagccgcaggaaaatgaccagccggcagccccggaagccgacctggaaaaagcaccgcaggcaggaagtgattccccgtatgcaccgcatgtagtcagcacccaggtggccttcctgatcaaagacgccatgaactccaatatctatggcgaaccgggctggagcggaaccggctggcgggcaatgcgggatatcaaacgccgtgacctcggcggtaaaaccggtaccaccaacagctcaaaagatgcctggtttgtcggctacggcccggacatcgttgctgcggtctggattggttttgatgaaaacgcccgtgacctcggccgtggtgaggccggtgcgaaaagcgcccagcctatctggaacgactttatgaaagttgcgctggaaggtgtgccggaacgcaaagatccgccgccaccgggaattatctccgttcagatcaaccgcagcaccggtaagctgggctccggcggcaactcccgttccgaatactttatcaaaggcaccgagccgactgattacggcgtgtcggaagtgggtacaacgattatccagcaggacggcggttcggaagaactgttctgattaagcggataaaaacagaagggctgcctgaaggcagcccttttttttcaatcgttgttacttaacacaaatgaatgtcttttttcgatgattaacacaaacagatttgtgttaaaaatagcttagtgaccggtacgctgtaaaaattgctgcgccagaaacagcgcggtaatattgcgcgcttcgttaaaatccggatgagtcagcagatccatcatcttactgaccggccagcgctcctgaaccagcggttccggctcatcgccctccagcttttcaggatacagaccttccgccagcaggatattcatctgcccggagaaataggacggggacatagtaacgcggcgcagcggtgtcagtgtgcgggcaccaaacccgatttcttccttcagctcacggttggcggcagtcagcatatcctcaccgggatcgacagcacctttcgggaaacccagctcatagctgtccacacccgccgcgtattcccggatcaggataagttcgttatttaccacagggacaatcaggacagattcacgggttgcaggacgcatacgctcataaacccgttccgcaccattactgaatttcagtgcaacagactggacagtaaacagacgggattgggcaacagtctcgatgcggataattttcggtttttgtaattcagccatgtatgcctctgtacgtaatataaaaacgcagtacaaccatacagagtaaaactgtacagggtgaaaaagtaccgctttgcgaataagtaaaaaccggggtaaattccctggttcactcacttattgctctgcttcatattacccgttcctgagacaaagaaaagcaccgggcgggatgaataaataacggtaacatacagcataatcagcaggtaaaagtgaaaataatcagttataacagactgttatttcaaataattttttttgcataatcagaaaaggccgattttttaacggcttccttcactgttatgctgcacaggcaattacgacggggaaaaaatgactatcaccctcattataacggccgctctggtgatcggttgtcttataatggtttctgttatcagtcaccggcggagacagcgccgggcaggttatgtattaccttcactggccagtctgacacaccaccggccgggtgccggtgaaattcaggccattgagcaccatctgacctgcgctgcccggcaggcggtcagtaatgatctgcactttacattaccggctttccccaaaaaaagtgatcacgtctatcgtctgtgcaaccgcatcacccggtatgctatcccggagaaaaacggacagcagtggcattactacattgaaggcaacgaggtttatctgcctgcggttctggatgaatttattcaggccacaaatgtcattgatgtgatgtttactgacgggataccgatgattgtcgggctgaacggtcatgacttacgtgagtttactgatgaccacgcgctggcaaggccaatgacaaaaaataacaacgtaccggtacaggccgcgatactgactaacagcaatgctgatattgagtttctcggcacacgcagagagagccggcaggaatataacctgcagcacagtcacgggtttatcagcggcacgctgattgtctgcggcgtgctgacggcgctcactgcggtttttatgccgccgtttttattttactggatgatggccgccggagccgggctgctgctgccgggcatcattttatccctgatcccgatcagtaaccgccgccgtctgcgggatattcagtgctaccgggggatcccgaaacgctggggtctgttcggcgattttgaccacagtcagaagcacagcatttcactcggcggtatcgaccttatctacccgcgccactgggaaccctggctgcatcaggatctcgggtctgtcacacagattgaaatgtatgaggatcagcaggttgtccgccaggggaaatacctctccctgcgcgaggaatccacccgcttcccgtatcgccgttacggcaaaaatctgctgatcgccctgaccagcgcctttgccctgctggttctggcctgcaatcagccggtcaatttaccggttaaactggccctgaactggctgaccggcacagaaaccaaagtcaccaccaatttcagtgaactccagaatatgccgctctatgtgggggattttctggaagccaaaggcgtggggatgtgttacatgccgccgaacctctccgcccaggataagcccaatttccgcgcatttgactgctccggtatttactggaacaacacctccccgcttccggttcccgagtccgaacaggttgatcgcgccgccgcgctgcttgccgaactgaataaccagctgcatcccgatgccggagcccgtaaggtgaacgacagtctgcgcaatgttatcacccgctcagggatgagcctgctggatgacttttcctccctggttctgaaaacccaggcgttatgtgaatttgaaaacagtgactgtgtgcggctgaaaaacgccctcgtcaatctggggaattccccgaactgggaaaatttattagcccgcgccaaagccggtaaactggagcaatcgaatgttttattgcgtccggcaagtgcagaggccttggaaaagctggttatcgccaccacatctacagctataaacaaagaagtggaaaatgcggcaatgcggctgaacagtccgccgcctggtggtgtgctgctgatcagtgacgaaggcaaatccctggtggagaacgccccggtcaatgaacagacagaggaaatgacaccgctggcacactggcagtccctgcagaagctctccaatatgctgctgcacaccccgtttgaggttcagggcattgtcacggatgtgtctgtggatgccaacggcacccgtcatatcctgctgcactttcagccggatagtgtcatgctggcgcggtttatcggcagctgtattttactggtcgtcttttcccttctggccattatcaacggcatctatacgtttatccgctggcgtcagcgccgccgccggatgacggatatccgccgttattatgacaactgcttccggcacgactacccttcctctgaggtgcagccgtaacggctgcactgtctgtcacggagtaaccatgcaacaggcttcacaggtcacagagcctgtccgccttgataaatggctctgggcggcacggttttataaaacccgctccatcgccagaaccatgattgacggcggcaaggttcattataacgggcagcggaccaagcccggaaaactggtcgaaaacggcgcggttatcgtcctgcgtcagggaaatgatgaacggacaatccgcgtgctggggatcacggacaagcgcctgagcgcgccgctggcacagacactctgggaagaaaccccggagagcatcgaaaaacgtgaaaaaaccgcgcttgcacgtaaaatgaatgccctgacgatgccgcacccggaacgacgtcctgataaaaaggaacgacggacattgttaaaatttaaacacagtaattcagataccgcggaataaccggcggttaagacgagagaaaattatgtctgcacgacaagatacattacaccggttcctgtttaacaaaagcgatgtccggggagaattggtcaatgcttccggcacattacagcagatcctggataatcatcattacccggagcctgtccgccgcctgctcggcgaactgctggtctgcaccagcctgctgaccgcgaccctgaaatttgaaggggatatcaccgttcagatccagggcgacggcccggtccgtctcgctgtgatcaacggcaacgaccgccagcagatgcgcggtattgcccgtatgaacggcgatgtgcctgccggtgccggtttccacgatatgatcggcaaaggctttatggtcattactattacgccacgtcagggcgagcgttatcagggtattgtggcgctggaaggggaaactcttgaagcatgtctggatgactatttccgtcagtccgaacagctgccgaccagcctgtttgtccgcgttgcggaacacgacggcaaaatgcaggctgccgggatgctgttacaggcactgccggcatcagcagaagcccgtactcaggaagaaacacagaacatgttcagccacctgatgcagctgactgccactatttcgtctgatgagctctttaccctggatgccgaaaccatcctgtaccgtctctatcatgaagaagacgttgtgctgtatgaaccggcaccggtagcgtttcattgcggttgttcccgcgaacgctgcgcagatacgctggtaacactgccggaagaagatgttaatcatattttgcaggaagatggcaaaattgatatggagtgtgaatattgcggtgctcatcatatctttgatgaacaggatattcatgaaatccgcactcagaaaaacgcttcgctgcactgattcgttttagctgacgcaacaccaggccgcaccgggctcccaggatgcggcctttttgtttattttttcttatggtatcgagccagctcacaaaataaacccaaataaaatccggattttcatttatttgatagcaatcgctgttaaccagtcgtaaataattatgatatatggagatattccgacaacccggaggctttggatgagcgtaaaaacaatggctgtgaatgaactggagcagtatggtatccgcgatgccgcagaaataatctataacccgagttatgacttactctttgatgaagaaacccgtcccggcctgaccggttatgaacacggtgttgtcaccaccagcggcgcggtcgcggtagacaccggtatctttaccggccgctcaccgaaagacaaatatctggtcagggatgatctcacccgcgacaccgtctggtgggcggatcagggaaaaggcaaaaacgacaacaaaccgctgtcacaggacacctggaattccctgaaacacctgatcaccaatcagttatccggcaaacgcctgtttgtggtggacgccttctgcggcgccaatgccgatacccgcctgaaagtccgctttattaccgaggttgcctggcaggcacacttcgtcaaaaacatgtttatccgcccggatgaaaacgaactgcatgattttgaaccggacttcattgtgatgaacggtgcgaaatgcgtgaacccggactggcaggcgcaggggctgaattcggaaaattttgtggcattcaatctgagcgagcgcatccagcttatcggcggtacctggtacggcggtgagatgaagaaaggcatgttctccatcatgaactatctgctgccgttacagggcattgcctccatgcactgctcggcaaacgtgggtgaaaaaggggatgtggcgattttcttcggcctgtccggcaccggtaaaaccaccctctcaaccgatccgaaacgtaaactgatcggcgatgatgaacacggctgggatgatgacggcgtctttaactttgagggcggctgctacgccaaaaccattaatttatctgcagaagcagagcctgatatttatcacgccatcagccgcgatgcactgctggaaaacgtggttgtccgtccggacggcagtgtggattttgatgacggcagcaaaaccgaaaacacccgggtttcttaccctatctatcatattgaaaacattgttaaaccggtttccaaagcgggtcacgccaacaatgtgattttcctgactgccgatgccttcggtgtgctgccgccggtggcggaactgacaccggaacagatgcagtatcatttcttatccggatttaccgcaaaactggccggtaccgagcgcggcgtcacagagcctacacccactttctctgcctgcttcggtgcggcattcctgacgctgcatccgacacagtacgcagacgtactggtaaaacggatgaaagcggccggggcaaaagcgtatttagtgaacaccgggtggaacggaaccggaaaacgcatttcaattaagaatactcgtgctatcatagacgccattcttagtggggatattgataaagcggcaaaacatacgctgccggtctttaatctggccattcctcacgaactgccgggtgtcgacagtcatatactcgacccgcgcaacacgtatgataatgtggcgcaatggcaggaaaaagcggaagaccttgcagggcggtttataaataattttgataaatataccgacacgccggcaggtcaggctctgattagtgcagggccttcgctgtaaccggataacaagaaaagtagtgtgagcaacacagtagccccgggtcagatgatccggggctttctgttttattgagcagacggcaggtcaaacagcaggatttcactgtcttgcgcggcgttcaggctgattaacgcttcatcccatacagctacgccatcactggttttcactgtctggccattcacggtcagttcacctttcaccacctggatccagaccatccgtccgctctgaggctgatattctccctcttcaccggcggccagtgtccagcgccacagagtcatgtcctgaaaaactttcagcgagccgtcacgggcatccggggaaagcaccagctggcgtccgtttgccgcatcgaaccggcgctgttcatagcgtggggtcagaccggttttttcagggataatccagatctgatacagatgcagcggattatcattactcgggttatattccgagtggcggatcccggttccggcgctcataatctggaactcaccggcaggcacctgttctttattccccatgctatcctgatgctcaaccgcaccacccagcacataggtcagaatttccatgtctttatgcggatgggtgccgaacccttggccttccgcgataaagtcttcgttaataacccgcagagctgaaaagcccataaagttacggtcataataatcggcaaacgaaaaggtgtgccagctgtcaagccagccgtggttggcatggccgcgttcatttgcagggcgtacatagatcataatttttctcctcaatctgatgaggttaagtttacgtcctgccgctaatttcaccagtagccgggtttaacgcaagaattcaaaaaatttgaataagtggagagagggggataaccatccaaaccagaaagaataaaaccatcttctttcagaccggggcagcgaatccccgggagcatacatcagtatgtgaccggggtgagcgaggaaagccaacgcacctgcagcgcgaatggctccggggaaaaaagggaaaaaaaaagccagcactgggctggctaaataaacactggaagcaatgtgagcaatgtcgttctttcatctgaaccctgaaggtggtcatctgaaagtgatttgatgataatagttctcagtatcatttgtaaagcactttttgctcaggatttcgtataatcactgatgttttctgttaactcactgataccgtgatttattttaataaaattaaataattccatagggttatcagggattaaacatccggtgaaaacggcagtgcctgcgcacatgcccacgcggaactccatgcccactggaagttatagccgccgagccagccggtcacatcggtcacttcgccgataaaatagagtcccggcacatcgcgggcttccatggttttggaggagagcgcctgagtatccacaccgccgagtgtcacttcggctgtccggtaaccttctgtgccattcggctgcacctgccagttctgtaatttctccgtgatttcctgctgtacggctttggataactggttcagcgcagtatccggcaggtcaccggttgtctgtaaacactccaccagccgttttggtaacagcttcgccagtgcattacgcaggctcagattcgggtgtttttcccgctgtacggtgaaaaattccgccagatcggtgcccggaagtaagttaatactcacatactcaccggggtgccagtaactggagatttgcaggaccgcagggcctgacaggccacgatgggtaaataatatattttccgcaaaccgggtgccatcctgtgcggtaactgtcgcaggcactgccacgccggacagcgtctgtaaggcttccagcagcggtttatgcagcgtgaaaggcaccagtgcggcgcgggtcggtaataccggcagaccaaactgttccgccaggcggtaacccagcggagtcgcccccagccccggcatcgataatccgccgctggccaccacaagtgagtgagcgctcacaacctttccgttaacggtcacacagaaatcatcgccctgtttctgtacctccgtcacctcactgcgcaggcggataaccacattccccgactcacactccgccagcagaagatcaactatctgttgtgcggaatcatcacagaaaagctggccgagggttttctcatgataggcaatctgatatttctgcaccagggcaataaaatcccactgcgtataacgggcgagcgctgacttacaaaaatgcggatttttgctcagatacgccgccggttcggtataaaggttggtaaaattacagcgcccgcccccggacatcagaattttccgcccggcttttttaccgttatccagcaccagcacccgcagcccgcgctgccctgcctgcgcggcacagaacagtccggcggcacccgcacctattacaatcgcgtcaaacttttccaaaatagtgttctctgtgtctttaaatgtggagaaattccgataaatgtcttaaatttgtcatgatgattaaatcaggccaaaaatttattcttttcagaaaaggagcctaatccgatgatatacaaggattaataattccttaagctgatttgatgaaggtatcaaatcaaaaaaaggccatatttcacttccccgggacgcatttgtcgctgataatgcgccgcgttcatgtccaacaactggcttaacgtctatgctacatctatttacaggcctggaatttcacaccggccttttgttagtactggcactgatctttgtgctgttttacgaagccatcaacggcttccatgataccgcaaacgcggtagcaactgttatctatacccgtgcaatgcgcgcgcagcttgctgtcgtcatggccggtgtatttaacttcctcggggtactgctcggcggtctgagcgtggcgtatgcgatcgtgcatcttctgcccacggacttactgctgaatgtcagttcggcccatggtcttgccatggtcttttccctgcttctcgccgctatcatctggaacctgggcacctggtacttcggtatcccggcctcaagttctcataccctgatcggcgccattatcgggatcggcctgaccaacgcaattgtgaccaacagttccgtggttgatgcgctgaatattccgaaaatgatcagcattttcctttctctgattctgtcaccgctggtcggcctggtgatcgccggattaatgatctggttcctgcgccgctactggagcggcacgaagaaacgccgccgtatccacttaacaccggcagaacgtgagaaaaaagacggcaaacgcaaaccgccattctggacgcgtaccgcccttatcctttccgcagtcggcgtcagcttctcacacggcgcaaacgacgggcagaaaggtatcggtctgattatgctggttctgattggtgtcgcccctgccggctttatggtgaatatgaattccagtgattacgaaatcgcccgtacgcgtgatgccgtggtcaacctggagcagtattacaccacgcataaggatgcactggcacacgccattgagctgaccccggcactgaacacggagaataccgttctcaatgaacagttccactgtgacagctcccgtaccggcatcgtattaagacaggctcaggatctgctcggtaatattcatacctatgatgatttattaccggaacagcgcagccagatgcgccgtctgctgatgtgtatttcggataccgccgcagaagtggcgaaattaccggaaaccaaaccggaagatgcgcgtttcctgaaacgtctgtccaatgacctgctgaataccgttgagtatgcgcctatctggatcatcatttctgttgcgctggcgctctctctgggcaccatgttcggctggaaacgtgttgcagtgactatcggtgagaaaatcggtaagaaaggcatgacatacgcccagggcgtgtctgcgcaggtcaccgcggctgtctccattggtgtggcaagttataccgggatgccggtatccaccacccaggtgctctcctctgcggtggcaggtacgatgattgttgacggtggtggtgttcagaccaaaaccatcaaaaacatcatgctggcctggattctgacactgccggtgtccattatcctgtccggcgtgctctactggatctccctgcagattatctgaccgcaggttgctatcctctgaaacagaaaagcctgacacgtgtgtcaggcttttttttgcatccggtaaccggttacggccagataatcatcatcagcagagaggcaatcacaattccgcatatcgcactgatcatggtgaactgacggcggatacgttcgcagcgtaaaatcacttcagggtcatgatgagtgagatattcccgctgattgatatagcggataaggcgcagctgcttctgccactgggtgtggtcagtaaacgcattattgccgccgacagcgtggtagagtagcgggtcgctgtcacgcaggacggagagtaatgcccgggtggatgaataaaaccggatcatgttaatcagacaaagaaaacataacgcccagaacagtgtaagtatactgaacataatccactccttagactatctgcggagaaggaaccggtgatatcagtgtctatcacatcatactgacagtattttatgtattcagtatgaacaatgctgtgaagttccacaaactctcgcattctttcacgataatcttctgaaaatatccgttttgccactctcatccttgtgagaagtgcacagactggtatatcttataaatcagacattctctgctgcctgataaaagcattgagttgtgatcagcattacactctttaatgatattaagcagttatagtattcataaaggatagcggcgcaagccctgccaaccccttaaccttttgaacggaaggagtttcttatggcatataaacatattctggtcgcagtcgatctttcgcctgaaagtgaagtgttagtaagcaaagcagtttctatggcaaaaccttacaacgccaaagtttctctgatccacgttgatgtcaattactctgacttatacaccggacttatcgatgttaacctgggtgatatgcagcagcgcattactgaagaaaccagtaattcactgaaaaacctggcgaaaaattccggttatgagattcaggaaatgctcagcggcagcggtgatctcggccaggtattagtcgatgccatcagaaaatatgatatggacctggttgtctgcggacaccaccaggatttctggagcaaactgatgtcttccgcccgtcagctgattaacaccgttcatgtcgatatgttaattgttccgctgcgggatgatgataacgcataatcctctgctgaaaaattattcatataaaatgcctgcttatgcaggcattttttttggctgaaaatgcggctgccgaatccgtcaaaaaggccgtcaacgaattttttttgtcatatatgaaaaaaacagcttgaaaacaggatataaacaagagataaattcaagtggtaaatgcaaacacatctcacattattcgaaaaataaaacaaaaatgttcgggatacctcacaaagtaacgtaacccgatatcattcgtgtcacagatatgacgtacgcgaaaatattccggagaacctgccccgggagacaagtgcggcctgcataactgctgcatgaatgagaagggcatgacagacaggaaatcaacatgagtaactttatctctttggaaacgtttctggaaaatgttcagcgccgtgacccgtcacagccggaatttctccaggcggtgcgcgaagttttctccacgctatggccattccttgaaaagaatccgcagtaccgcgatcagaacctgctcgcccgctttgttgagccggagcgcgtaattcagttccgcgtgacctgggttgacgatcagggtcaggtgcaggtaaaccgcgcatggcgtgtgcagttcagctccgctatcggcccgttcaaaggcggcatgcgcttccatccgtccgtaaacctctccatcctcaaattcctcggctttgagcagacactgaaaaatgccctgaccacactgccgatgggtggcgggaaaggcggctctgactttgatccgaaaggcaaaagccagggcgaagtgatgcgtttctgccaggcactgatgaccgagctgtaccgtcatctgggcgcagatacagatgtccctgcgggtgatatcggcgtcggcggccgtgaagtcggctacatggcggggatgatgaaaaaactgtccaacaacaccgcctgtgtgtttaccggcaaaggtctctccttcggcggcagtctgatccgtccggaagccaccggttacgggctggtttacttcactcaggccatgctggaacgccacgggatgagtttcgacggtatgcgtgttgcggtttccggctccggtaacgtggcgcagtacaccatcgaaaaatgcctgtcactgggtgcgaaagtgatcactgcatctgactcctccggtaccgtagttgacgaagacggtttcaccgccgaaaaactggcgcgtctgaccgaaatcaaagaccgttacggccgtgtggaagagtatgcgaaagagttcggcctggtgtatctgaaagatcagaccccgtgggctgttccggtggatatcgctctgccgtgcgccactcagaacgagctggatctggctgatgctgaagtgctgatcaaaaacggcgttaaagccgtggcggaaggcgcaaacatgccgaccactatcccggcaaccgatgccttcctggccgcaaatgtcctgtttgcaccgggcaaagcagcgaatgcgggcggcgtggcaacatccggcctggaaatgtcacaaaactcagtccgtctcggctggaaacgtgaagtggtggatgagcgtctgcatcacatcatgctggatatccacaatgcatgcgttgagtacggcagtgaggaaaaacagaccaactatgtgcagggcgcgaatatcgccggcttcgtgaaagtcgctgatgccatgctggcgcagggtgtgctgtaagtctgtaagctgttactgaaaaacgtcacagtgtcgaagggggtataacaagcgttacggaagtctcacttgttgccccttcgcgaaacgggaactgccctgtccccttttcagatgttattcagtgttatccctctgctttcacacagggatagatatcaaaacgatgatttttggtttcaatcgccgcagcggctttctgcccggctaacggctccgcgtaatccggacgtttcaccaccacacgacgggttgccagcgccagtgcaggtgccagcagaagatccgcatcctcatccgcacccaccagcgactgaaacacccgcatttctttcttcaccagcgcgcttttctgccggtgcggatacatcgggtcgagatagaccacatccggcggtggtgtgatttccgccagcgcatcaatcccggacgcatggataaggatcattctctcctgcatccatcccccgatttcactgtcccggtaggcccgctgtaagccatcatccagcagtgccgcaacgaccggatggcgttcaatcatccgcacatgacagcccagcgatgccagcacaaaggcatcacgcccgagaccggctgtcgcgtccaccactgacggaagataggatttcttaatcccggcagcctttgccaccgcttcaccgcgtccgccgccgaaacggcgccggtgagccatcgttcccccggcaaaatccacacggatcccgccgagtttcggttcatcacacttgcgcagctccagcccttccgccgtcagcaccagcgccatcagcgcggtatcatcatgctccaggccccaccgcgccgccagtacatcaagggcgcagctgtctgcgccctgttcacactgtaaacgaatcttcacgtattacccgttgattccgtagccttttaacatcgcatccagttccggcttacggccgcggaagcgctcaaacaggaccattggctcttccgaaccaccccggctgagaatattatccaggaaagactgcccggtgaccggattgaagataccttcctcactgaagcgggagaatgcatccgctgccagcacatccgcccacagataactgtagtaaccggccgcataaccaccggcaaagatatgactgaacgcatgcggaaagcggttccacggcgcagcaggcaccacagagactttctctttcacagacagcagtgtcggcatcacctgagcgccggttgccgggtcatattccgcatgcagacggaaatcaaacagcccgaactccagctgacgcagaataaacatcgcagactgataattcttcgctgccagcatattgtcgagcagcgactgcggcagcggctcaccggtttcataatgaccggagataaaggccagcgcctccggctcccagcaccagttttccataaactggctcggcagctcaaccgcatcccacggcacaccattgatgccggaaacatccgccacatcaatctgtgtcagcatatgatgcaggccgtgtccgaactcatggaacagagtcagcacttcatcatgagtaaacagcgccggtttgccgccgaccggtttattaaagttacaggtcagatacgcaaccggtttttgcagggaattatctttgtggcgcatacggccgatacagtcatccatccacgccccgccgcgtttgtgctcacgggcatacagatccagatagaaactaccgcgtaattcaccgttcttatcaaataaatcaaagaaacggacatccggatgccaggtttccaccccgaaacgctctttggcggtgatcccgtagatccggcggatcacttcaaacaatccgctgatcgctttttcttccgggaagtacggacgcagctgctcatcactgaccgagaacaaatgctgtttttgcttatcggcaaaataggccatatcccacggctcgagtttatcaacgccgtaatgttctttggcaaaggcggccagctgagccacttcctgctcgccctgatgatgggcgcgctccgccaggtcattcaggaaatccagcacctgctgcgggttttccgccattttggtggcgagggatttttccgcgtagtttttaaagccgagtaactgtgccagctcatgtcgcagcgctaaaatctccgccattacactgctgttatcccacttaccgccgttcggccccagctcggaagcacgggtgccgtaggcttcgctcatctctttgcgcagctcacggttatcggcgtaagtcatcaccggcagatagctcggcatatctagggtaaacagccagcccttctcacctttggactccgccagtgcctgtgcagcagcaaccgcactctccggcagaccggccagcatgctttcatcggtgataagcttgctccagcccatggttgcatccagcacattattgccgaacagcgaacccagctcagacagacgggcagaaatctcgccgtagcgcttctgtttctccggtggcagaccaatgccggataactcaaaatcacgcagggaattttctactgacttgcgctgagcctgagacagtgacgcaaacgccgggctgtttttcagtgatttataggcgttatacagcccttcgtgctgacccatccaggtactgaattctgacagcagcggcaggcactgttcataagcttcgcgcagttcagggctgtttttgacagagttcagatgactgaccggcgaccagacacgggataatttatccccggcttccgccagcggtacacacacattttcccatgtaaaatcaggtgaatgactcaccacctgctctaccgtctgacgataattatccagcgtttctttcaccgcaggcacaatacattccggattgatggcagaaaatgccggtaactgattctgagtcgggataagcaaagggttcatcataaaccatcctgttggctgctggtgcacgtccgccacagcgcacatacacatgaaaaatgaaaatcgaaactctctataagatggggacacactccggcaagttcaatgatttttagtgttattatgctgattaaaaatcattctcgtaaaaaatcgcacgatactgatgtatctcaaaggaaaaaacgcaagagaacttttgaatccctgccggaaagcgtatactgtgcaacctcaaaacggaagatcatcgtccccggtggggcggccggacttcaaatccggttggggccgccagcggtcccgggcaggttcgactcctgtgatcttccgccaattatattcatccgcacatcgctaaaacccacctctgtaatatcatcagcacacaactaaccggtgtgagtattttaacatttatttttccgggtatattggtagcatctgtgttcattccgctgagataacaacccgtaaaacggagatcgtgcaatgagtgataatcttcctgaggcaccacagggcgaatttattctgttccgcagtgaagatggtcagacccgcgttgaatgccgttttgaatctgatacgctgtggttatctcaatcctcgatttgtgagctttacggaaaagctaaagctacgattagtgagcatatcagcaacatttttactgaaggcgagttagccgaaaattcagttattcggttttaccgaacaactgcggatgatggtaaacagtacaatgtaaaatacttcaatctctcagtgatcctcgctgtcggttaccgcgtccgctccgttcgcggcacacagtttcgccagtgggcaacgcaaacactggaacagtatctgatcaaagggtttgtgatggatgatgagcggctgaagaatccacctgttggtcagtctgtggtgcctgattactttgatgagatgctcgaacgtatccgtgatatccgcgccagtgagcggcgggtgtatttacggataaaagagattttcacgctggcggcagactacgaaccttcaaataaagaaaccacacgcttttttcagatcatccaaaacaaactgcattttgcctgtaccggcatgaccgccgctgagcttatcgccagtcgtgcagatgccaatcaaccggatatgggattaacaaattataaatctggtgaaatccgtaaaactgatgtgacgattgcgaaaaactatctgcgggaacatgagctcaaagaattaaaccgtattgtcaatatgtggctcgattttgccgaagaccaggcgctgcgccgtaagcaggttttcttacaggattgggatactaaactggatcagtttttaagtttcaatgaccgcaacgtattgcagggcgctggtgggatcagtaagaaagcagctgatgaaaaagccaaagacgtatttgatatatttgaccggaaacgccgccggttaaaagagtcagaaggggcgagagcgaatatcgcggcactgagagatttgctgaaaaaagggaagtagaaaaatcacagagccattatttttaatgtcagctgaattattaacgcccggtttatgccggaaccggacgttgtaaacaaagagagtaattactattcagaaatcagtcttagaaaaaccggtcatgtcatccagtcccatttcgcggcctaacgccgtcatcggatggacaatgatcaggccccgcaccgatttcttcagcttgccgatatcagcctgttctttcttagtgatagagcgcttgaacggcatatccaccagcttttgtgcttctttgctgagtttcttgctgcgttgttccttcaggcgggcaatgtcagtttccagcgcggctttttctttctcaagttctgcgtacttttccgtttcgttcttttgcagcataccggccatctggtgacgggtaaggtctaaacggtcgctgagaagcttgatttgtgctttttcgttttctttcattttaattaaccgtgaataaatttcctgccgggaagtatacaccattctgcataagaggacgaaaagggaagatgtcacaattttaaacattaaaacccaattgtgcccatgcgtctttccattcagaaattcgttttaccgaaatagcatgatgagtcgagttatcattaatagcccgccttccgttatgtttatctaaataatctgaatgagcctcataaatatcattctgtatccatgacaatggtattatataaaaagtggcaggctcttttctgatatcgataaatatccagaattcatcgtcttttttatcaggtacacacttatttgcatagttgattgatgtttgccacgtccctgacattttagctctggttgttactttatattttttgccagttggagagtcaaatttgataaacgttctgcggccttctttgcagacggaaacatttatagcaccaaggctcattagtttttgcaagacctttaactgtcctgattctgctgtagtcatctttcctcctgaatggaaagttgttatgtccgcccggaatcttactccttcacattccagtttttaaaatagcgttttaatttttcgacagtatggcgccatttcggtgccgtgggtttacaaacggtattttggttaccgaagaatccgacttcatttaccgcctcttgttcactgcgggtttccagccatttgacagggacaaaatactcagatttatcaggatcatctgcattccgctgataaagttccctgtacctgagtacatccatcgccagcttttcaccctcttccgtagtgatagtaaagctaccggcaggctcaacggcgctctgcacaataccaacgccgacataacccgtcgccgggatttttacccacacccggtcccccggctgaagttgtttcagcgtctggctgtaccagcttccgccgcccgcactgataaatccgtaacgacgagcctcttcccagacacggctttgcgggtcgccaaacgagacataaaactcaccattccagggctcttttgtattcgcacttgtggcggtggcctgtgccgcattagtttgcgtttcactcgggtcgataagccaggcgcggcttaagaattgctcctcaccatgctgaaaaaccttaaagaacaggacgttaattgagataccatttttactcagataatccacaatacgctcggtggacgggtccagctctgccgccacaataatgatttgatgtgactgattaagcgattcttcctccagctcagcattgaaacgcagtctgaatgcatcacccagattgccgccaccagagaatttttcataaatctgcgacagacggtcagcagtaagatcatccacccaggaggcgtagtccagtgcctgtgcgaccacttcacgcggcgtacgatcacgtttaagttcaatcaggaccagtgatgcgtccggcgcaatcgccagcagatcaatacggcccttatcgagggtattttcctgatggccgataatcatccactggtcggagagaatggtcgggtcatttaaaatcatcttctccagcaactgctcactggcgagtttgctgatggttagcggctggggattttcccctatccgccagattgcatgatgaaccggcatcgtctgttccttagtttaatgctgcgtcagtgagtgcgtccgccagatggagctgggtttgttgggcggattgcagtcgggatttgagagtgtcgcaaaccttaattagttcttctaccttgcaggttatttttatttgttcacttagcggtggtataggaactaatgtatttgatacttttgccaaatttaaatttggctgtgctccacctgctgctaactctcttaaatccttataggatttttcgaaaaataattttatataacaacgatggtattcatttgtattaaaaagctgaattgctgcacaagcctggtttgttcctgcagaaatacataactcagttatctgaccgcgagtttttccttggccatacatcgcaataataagtgtaccaggagagtaaatagatacatttgtttcttttacagctttccctgaaattttttcagctgtattaaatataaatggtaaagaagtttcaccacttgtaacccagttaaactcaggggtctcccaataatcaggattatccctggatggggttgcccctgtaccaacctgagctatttcaattatacgacaccactcccacccctgcggtaattcaaatggtttttcctcatcactcactggcggcaacggtttttgttttttaattttcccttgttttaccaactccgctttctcttgctcaatacgtttaagcagctcagaagcaggttcgtcatcaggatcctgcggcacaagtttacccattaccgctaattgcaggatggtttgcttaagcgcatcgatactggcttcggtggtaaacagcgtgtcgaaatgctgactgattcgcacccagttgtcagaaagctctttggtattttggctgtcggtcagcgttgccagcagggtttccaccagttgctgatgagcatccagactggataaagattgctgttccagttggtcgcaaaggagcataagttcatctatttttgaaaccaaaccaatttgatcttgttcactagcaaaaggaattaaaacctcatttgctctacttattgtcaatgtgtgaacggttgttcccatgctatatttgtggatctcatctttccaatacttggaagtgaatattttatttaaatattctgaataaattgcatgagtatttttaaaaataagaacacttgcatctttaaagtaaaatttatcataaggtttaacaatgtaaggtacacctatcgtccccacaccagtgagcataatgtcattagtttcaggtgataacccgttcagacataaactttcaaacaattcaggggaaataaataaatcattatttacttcgccatattttgctaaagttacaatttcacgagcccgataaaaaggaataccgtcaggtttccaatcctgttgatgcacccggctgctcgagccaattaaacccaaatcccccaaacgtacccactcccaccccaccggcagctcaaacggcttctcatcttcgctaatctcaggaagtagtttttgctttttaattttcccctgctttaccagctccgctttctcagccgcaatacgttttaacagctccgacgccggttcatcattcgggtcctgcggcaccagttttccgcgtaccgccagttccagaatcagctcacgcagtttcttaataccatagagatcgattttgccattgctgccacgcccggcagtggagcgggtttgcagggcagaagaccagatatcgatatggtcagagatcagcttctcaacagtcatcagttagcatccttattgcctgtcagtgcagcgccaagaatatcgcgcaactggttacgcagtttgctgatttccgcctgctgtttctggtactgcgccagcaattcgtccgggtcgtggctgatgatttcgccctgatagggatttttaatatcgaggttgaagttgcgggcgataatgtcgttgatgctgactttccacgcctgatggttttctttacgggcagcaaaaccgtcggcttcatttccccaccagtcgatctcagcctgaaactcttcaaacttcatcggtttggttttactgtagttcttcacgccgtccgggtacgggtgctcatagaaccacacctctttggttggctgacctttggtgaaaaacagaatattcgttttgataccggtgtacgggttaaacacgccgttcggcaaccgcacgatggtgtgcagattgcactcctcagtgagcagttttttaatcttggttttcacgccttcgccaaacagcgagccatccggtaataccactgctgcgcggcctttgtctgccagcacttcgataatcagttgcagaaacagatcagcggtttcacgggtctgcatctctgccgggaagtttttctcgataccgtcttcttcggtaccgccaaacggcgggttggtaacaatcacatcaatctgctcatcccaggaagaaagcggcttattgagtgtgttgtcatggcggatttgtaccggtacttcaatgccgtgcagcagcatgttggtggtacacagcaaatgcggaagctgctttttctctacgccgcagatctgtttttgcagtattttgtggtcttcggtggtattgacgtaatgctctttcacatggtcaaacgcacaggcgaggaaaccgccggtaccgcacgccgggtccataattgactcacccagcttcggatcaatacgattgaccataaagcgcgtcacggcgcgtggagtatagaattcacctgcatttcctgcactttgcaggtcacgcaggatctgttcgtaaatatcgccaaacagatgccgttcccggctgctgccgaaatcaatttcattgagcttgttaatcacctggcgcagcagtgtgccatttttcatatagttataggcatcgctgaacgcctgtctgacaacaaagccacgcggatttttatcgatcggcgcgatgaggtttttaagccccggaaaaagatcgtcgttcacaaactccagtaactcatcaccggtaataccctcactgtctgctgcccagctgcgccataaatagcgcttcgggatcgggaactgataatcatccagctccagttccagctcttcttcctgggtatcgaaaattttcaggaacaacagccatgacagttgccccaaacgctgggcatcaccgtcaacaccggcatctttacgcataatgtcctgaagggatttaattactgaactaatcgacatgttttctttccatactaaaaaagacagccaccggccacaggcgcggcggtggcaatatatttattcgctgtcaggctaatcgtggcggtaaccggtagatttcgttttccagttcgttgacggcctgctcatacgctgctttgttaccaaagccggctctgatgatctctcccggacggcccagcgcatcaaacggtttcagtttgagcaccagaacgtcctcaatttcctgcacaccttcatcagcatatttgtccagcagagtattaagtacctgctgagccggttcggcatacttcgtaaaatagttacgtttacgcacatttgctgcacgctcctgacgcgttaacggcggctgaccgtacaccacatggcagagcaaatcaaacgggtcgagatctttacccacctcttcggccagtacatcccataaaatccccagttgctccagttcttcaatgatgacctgtttgcgcggagcattcttccatttacgcataaagccatccagtgaagcgtactcactgtctttcagcattgttttgcgggtgtaatcgcggaaggattcagtcaccagtttaccgccagaatcataatactgaacacgtttagccagcacttttacatgcacgccattcacatagaacttacggactttgtcgtcatcatcgtcactatggaattcaccacagccttcagacctgtcgcggttaacctgatagtcagcggtatcttcccgcgcttcaccggcggtattatcatcattttccgcatcaagttgctcgttaaaatccgaatcctgatcggaaatgtcaccgggtctgaccaccagcactttttccggcacgccgtcaaagcgctcatccgcaaacagttcggttgcttttttaaagtcgagaatggtgaaccacaacttaccgtacttttcgttgatacgcgtaccgcgcccgatgatttgcttaaatttggtcatggactgaatattttgatccagcacgaccagcttgcaggtctgcgcatcgacgcccgtactcatcaattctgaggtggttgctatcaccggataaggctttttcggattaataaagttatccagctgtgctttgccgatatcatcgtcaccggtaattttcatcacgtatttttcgttcttcaatacctgctcaggattaagcaccaccagcgcatgacgcatccgctctgcatgatcaatatcgttacagaaaacaatggttttatccatcgggttggtacgtttcaggtaatcggtgatagtcttcgccaccagcatagtacgctcatcaataaccagcgtgcggtcaaaatccttcagattgtatatacggtctttaatctctttgccgtatttatccagttgacctttaaccggccgccagccctgaacatcgacatcgatatcaacacgcacgactttgtaaggggcgaggaaaccgtcttcaattccctctttcagtgaataggtgtaaaccggttcaccaaaataatcgatattggagacgtcttctgtttcttttggtgttgctgtcaggccaatctgagtggcgctgccgaaatactccagaatctcccgccaggcggaatcttcggacgcactgccacggtgacattcgtcaatcacaatcaggtcaaagaaatccggagcaacctgtttataggctttctgattctcttccggtccggtaatggcctgatacaatgcaagatgtacttcataagcaggatcgatagtacggccggtgactttggtcatcgcagtgccgaaaggttgaaaatcattatttttagtctgatcgaccagaatgttgcggtctgcaagaaacagaatacgtttcttgtttctggctttccacagccgccagattatctggaacgcggtataggttttgcccgtgccggttgccataaccagcaaaatacgattctttcccgctgatacggcatctatcgtccggttaattgcccgcatctgatagtaacggggcgatttcccgctgccgtcatcgtaataatcctgactgataacgggcaactgttgctgagtaaaccctttccagtcgcaatatttttgccagagtagctctggtgccgggaaagcatcaagcgtaatttctgattcgagctgctgcggattggttttatcatggaagataaacccatcaccgttagaagcaaacacaaagggtacatcaagcagtccggcataatccagtccctgctgcatccctttactgatggcgtgcttattggctttggcttcgataaccgccaatggcaggttaggcttgtgatacagtacgatatcggcagatttcactttgatacgtgatgccagctttccgcggaccactatcttaccatcacgcagtttcacttcctgacgaatctgagtcaaatcatcccagccggcatccttaactgcgggaaggataaatttgctgataatatccgtttcactcatattcgttttgtttacaccagccatagcagagcgctccatgaaagtgggttagctctgactctacacaaattagtgcatcaggtaaggactaaagcaacatttcgggtattcacttcccctgaaatggaacaactataatcaggctttctgtcctgaaaacagcagaggtcataatgaagaaagtacgtttttccggataagggagagcggacatcgcatttctccattccgcagaaataacgtaatgttatagaaaataaacgcctgattcttacccgaatggctaatttcccgtcatcaaataacatcaaacgattaccttttaatattttcacatctttagcctgtcagatagtaatttgaggaagaaaaaaacgaataagcaggtagctttacagaacagatatatttttattccattttaactgatggggtatttttattttcagataaaaaatccccctgctgatatcccggctccctgatacatcagcagccctgcaataataaatatcccccctgcgatcaaccggagaatatcgccataatgccggtttattttttgccccggattacgggacaggcgcagtgccagaaagcgcatgctgtgtacgaaccaggctatcatacacagtgtgataccggttcccagcgccattgcaaataccgcgataattccccagtgaaaaacaccgataactgatgagaacagtaaaaccaataatgcccccgaacacggtcggctgcccatggccagaatcataccggcttgtgtccgccaattgccggtgactgtatttcccggcataacatgctgatgaccacaactgcatgtctgaacttgtccgctttgcagataaaccggttttaacgcaacagggggtttattatccgatacgcggattgtttttatttgcggcttattgaccggtggtctgataaataaacgacgtaatgtgcggataacaataatggcgccaaaaagaataataaatgcatagctggctttctccgttatctggctgacattatttaactggcgtactgacaaatttaatataaacagtacaacagagactaaaataaccgccacagtgccctgaagcagagaagccagaatacttaataacgcgctgtggcgtaattttgccggatgtgtggcgatgtaagcagaaaggataactttaccgtggccgggacccagtgcgtgcaataagccgtataaaaaactgaaaagcgtcagaagcccgcccgctttcagcggatcagacactactttctgaatcagcaccgccatttcaacattcagttctttttgtaattttgcactgacatgcagcaatgacggccactggctatacagcaacccacccgcagacaaaacaataagtacaacagtgagctgaagaataatccgtgaatatgatgtcatccgttatctcactccgggcaatgtaaggtgatctgctgtgcaaactggcgaccgagcgtcaggtcatcatccggggtatcgccggtatccagcgacagcgcgtaatctttcagggtatccgaaggatctgcctcggtaaaaactaaccggcactgtgatgcatccggcggagaaaggtgaaccgcgcgtttgccgttgtaggtcatactgacaaaaaaagtcggttcatacgttttcagctcaatggtactgccggctaacggtatcggatgcaatagtgagacacggaatgacataacaatctgtaatccctcacgcgtcatccggtaggtgtccggaaagagtttaagaggctgttttttattctgataattcagttcggaaaaataagactgtgcaattatattggccatcacagatgctgcctgcttcttccactgcgggctgtcttctttgctgttcatcaaatcatacagaatatctgcggaagtcatcggatccattttccagacatattcaatccccctcagcgtatggttttccgtcacaagggtcgtttccatatcaataaaactgtgcgggtgtgcaaacacctgcggactgaatgtcagcaaaaacaggaaagagagcagtaacgtattcattcttctgattaaattcacagattatctcacctggcaaaagatgttataacataacatagtgttacggatgaaaatactgttttctgaaacaccgcagcagacagaaaaacatcataaaatgacgaaagtgcgatccctgccacagatatccgtcattcattcacctgttcaataaaacatcataaagatataagtaacaccgccgataactcaaatatacccttatttgtttcgggagttttgtatgtcctggtatccgtcccgcatttcaacccgcctgactatcgggggcatcctgctcctggccgtcactactgccattatcattgttgttatgctgtggcggggtcagccccgcgttgtggaaattaatactgcattaattgaagaaaccggacgcggcctgacatcccgggtcagtacaattttatctcagacagacggaaaaacggtcagtctggcgcgcctggcggaagtgctgcccaatgatgaggcgctgtaccgctatatcccgcccaatctgattgaaagcaacagcctgatcaccggtggcgggatctggccggagccgggggcattcaccccgggaattgagaaacgcagctttttctgggcacggaacccggccggggaactggttttttctgatgagtacaatacagagggtgccggtaattatcacaatgaaagctggtaccggaatgcccgtgagcaatccacggaaagctgtttgtggtctgatgtttaccgcgatgccatttccggtgtgaatatggtgacctgcagtgtgccgtacaaaaccgacggaaaatttgccggtgtcgcgacaacggatatccgtctggataatatcgccgcgattatgcagcaatacggcaacagcaccggcggctatgcttttgtgacagaccggcaggggcaactgatctattttccgggtgatgacagtaagcaattcaaaacctttgatgaactggctgcacaatcagcctggctggcaccggtggcggtaagcctgaagcaaccccattcagagcaatccgctatcgacagtatccgcattgataatgacgggcagctgaacaccgcttcacaggtgatgctgttcccgatggccgataccagatgggtcatcggccttgtcacgccggagagccggatcaccgggctggcaaaagtgatgatgcaggatgtgctggaagccctgctgccgatcatggcactgttgttgctgggttcctggctggttgtccgccgactgatcacccgcctcgatgaaacccgtaaggccctcgatgacatcgctcacggggaaggcgacctgacacggcggatggaagtgcgcggtgccgatgaaatctccgctatctcacaggcatttaatctgtttgccgataaaatatcatccatgttgctcacggtacgcagcagcagctctgttgtggctggaaataccgttaatcttgctgataataataacgaattatccgcacgggtcacacagcaggccgctgcgctggagcagagtgcttccgcgatggaagaactgaacgtgacggtacgtcagaacagtgagaatacccatcaggccgatgaactggcggaaaccactgcacaaacagcgagccgctgcggagatatgatgcgtgatgtgatttcgacaatgaacagcgttagtacatcatccggacgaatggttgaaatcgtgtcagtgatcgacagtattgcattccagaccaatattctggcactgaatgccgccgtcgaggccgcgcgtgccggtgattccgggcgaggctttgcagtggtggcgactgaagtcagatcactggctcagcgcagtgcacaggcagcacaggagattaaggcgctgattgatgagtctgtgcagaatgtcaaaaccggcagtaatcaggtgcatgaagccggagaaacgctggcagatctggtgatggatgtgttgcaggtaagacagctgatgagtgatatccgcgttgccggtgaggagcagagcaaagggctggccgaggttacgatggctgtctcagagatggataccacggtacagcagaatgccacattaattgatgatgctgcttcacggacgcaaatcctgcgaagagaagccgaacagctttcgcagatggtatcggcctttaaattaccggaaccgcgttaataatgcagatacgtttcccggcagaaaacgctctgccgggaacacgtgaaatatcagtccagatctgacgcattatgacgttcgcggataaaccggtctgacggctctccgccgctgcggttaacccggcgtccgcgctgaacagccggacgtgccgctatctgcttcgcccagcggatcacatgcggatattcactgacagacaggaatgtcgccgcattatacagcgtacccagcactaacccaccgtaccatggccatgcagccatatcagcaatagtgtaattatcgccggcaataaattcatgctgactgagctgacggttcaggacattcagctggcgtttggtttccatcgcgtagcggttaatcggatattcatatttttccggtgcatacgcatagaaatggccaaacccgccgccgacaaatggtgcagatcccatctgccagaacagccatgacagtgtttcagcccgttcaggctgagtttccggcaggaacagggaaaatttttctgccagatacgtaagaattgctccggattcaaagatccgtaccggcttcgtaccacttctgtcgaccaatgccggaatttttgagttcgggttaatatcaacaaacccggaaccaaactggtcgccttcgccgatatcaatcagccaggcatcgtattccgcatcgcggatccccgccgccagcagttcttcaagcatgatagtgactttctgaccgttaggtgttcccagcgagtaaagctgtaatgggtgtttaccaacagacagggctttttcatgtgtcgccccggcaacaggacggttggtattggcaaattttccgccgtttttctgtttccattcccacacctgaggcgggacataggttggatcagccataacgatgctcctttgtattttctgccggattgaagtgatcagttatccaatctacctttcggtgaataaaatacaaacggaattttcttttcgcccaaacgcaaaaaagccacccaaagggtggcttctttacttaataataacctggcggttccctactctcacatggggagaccccacactaccatcggcgctacggcgtttcacttctgagccattcccctagggtcgcgcccgcgctacggccgccaggcaaattcatttcaatccaaaacaagcttttcatagtgaccggctttatgctctgtcactatgctgaaaaattctttcgtctctcaactcaaaacaccttcggtgttgtcaggttaagcctcacggttcattagtactggtcagctcaacgcatcgctgcgcttacacacccagcctatcaacgtcttagtctcaaacgttccttcaggacccttaaagggtcagggaagactcatctcgaggcaagtttcccgcttagatgctttcagcggttatctcttccgcacttagctaccgggcaatgcaattggcatcacaacccgtacaccagtggtgcgttcactccggtcctctcgtactaggagcaacccctctcaatcttccagcgcccacggcagatagggaccgaactgtctcacgacgttctaaacccagctcgcgtaccactttaaatggcgaacagccatacccttgggacctacttcagccccaggatgtgatgagccgacatcgaggtgccaaacaccgccgtcgatatgaactcttgggcggtatcagcctgttatccccggagtaccttttatccgttgagcgatggcccttccattcagaaccaccggatcactaagacctactttcgtacctgctcgagccgtcactctcgcagtcaagctggcttatgcctttgcactaaccgcatgatgtccgaccatgcttagccaaccttcgtgctcctccgttactctttgggaggagaccgccccagtcaaactacccaccagacacggtccccgatccagattatggacccgggttagaacatcaaacgttaaagggtggtatttcaaggatggctccgtgcagactggcgtccacacttcattgcctcccacctatcctacacatcaaggctcaatgttcagtgtcaagctatagtaaaggttcacggggtctttccgtcttgccgcgggtacactgcatcttcacagcgagttcaatttcactgagtctcgggtggagacagcctggccatcattacgccattcgtgcaggtcggaacttacccgacaaggaatttcgctaccttaggaccgttatagttacggccgccgtttaccggggcttcgatcagaagcttcgcttacgctaacctcatcaattaaccttccggcaccgggcaggcgtcacaccgtatacgtccactttcgtgtttgcacagtgctgtgtttttaataaacagttgcagccagctggtatctgcggctggcttcagctccgtgggtaaaccacttcacctaatgccagcgtgccttctcccgaagttacggcaccattttgcctagttccttcacccgagttctctcaagcgcctgagtattctctacctgaccacctgtgtcggtttggggtacgattaatggtaacctggagcttagaggcttttcccggaagcagagcatcaatcacttcaccaccgtagtggctcgtcgtcacgcctcagtgttaacaaccgaccggatttgcctggtcagtccacctgcacgcttaaaccgggacaaccgtcgcccggatgatttagctttctccgtccccccttcgcagttaccaccagtacgggaatattaacccgttgcccatcgactacgcttttcagcctcgccttaggggtcgactcaccctgccccgattaacgttggacaggaacccttggtcttccggcgtgcgggtttttcacccgcattatcgttacttatgtcagcattcgcacttctgatacctccagcatgcctcacagcacaccttcacaggcttacagaacgctcccctacccaacaatatttacatatcgctgccgcggcttcggtgcataatttagccccgttacatcttccgcgcaggccgactcgaccagtgagctattacgctttctttaaatgatggctgcttctaagccaacatcctggctgtctgagccttcccacttcgtttcccacttaattatgactttgggaccttagccggcggtctgggttgtttccctcttcacgacgaacgttagcacccgccgtgtgtctcccgtgataacattctccggtattcgcagtttgcatcgggttggtaagtcgggatgaccccctagccgaaacagtgctctacccccggagatgaattcacgaggcgctacctaaatagctttcggggagaaccagctatctcccggtttgattggcctttcaccccctgcctcccacctatcctacacatcaaggctcaatgttcagtgtcaagctatagtaaaggttcacggggtctttccgtcttgccgcgggtacactgcatcttcacagcgagttcaatttcactgagtctcgggtggagacagcctggccatcattacgccattcgtgcaggtcggaacttacccgacaaggaatttcgctaccttaggaccgttatagttacggccgccgtttaccggggcttcgatcagaagcttcgccttgcggctgacctcatcaattaaccttccggcaccgggcaggcgtcacaccgtatacgtccactttcgtgtttgcacagtgctgtgtttttaataaacagttgcagccagctggtatctgcggctggcttcagctccgtgggtaaaccacttcacctaatgccagcgtgccttctcccgaagttacggcaccattttgcctagttccttcacccgagttctctcaagcgcctgagtattctctacctgaccacctgtgtcggtttggggtacgattaatggtaacctggagcttagaggcttttcccggaagcagagcatcaatcacttcaccaccgtagtggctcgtcgtcacgcctcagtgttaacaaccgaccggatttgcctggtcagtccacctgcacgcttaaaccgggacaaccgtcgcccggatgatttagctttctccgtccccccttcgcagttaccaccagtacgggaatattaacccgttgcccatcgactacgcttttcagcctcgccttaggggtcgactcaccctgccccgattaacgttggacaggaacccttggtcttccggcgtgcgggtttttcacccgcattatcgttacttatgtcagcattcgcacttctgatacctccagcatgcctcacagcacaccttcacaggcttacagaacgctcccctacccaacaatatttacatatcgctgccgcggcttcggtgcataatttagccccgttacatcttccgcgcaggccgactcgaccagtgagctattacgctttctttaaatgatggctgcttctaagccaacatcctggctgtctgagccttcccacttcgtttcccacttaattatgactttgggaccttagccggcggtctgggttgtttccctcttcacgacgaacgttagcacccgccgtgtgtctcccgtgataacattctccggtattcgcagtttgcatcgggttggtaagtcgggatgaccccctagccgaaacagtgctctacccccggagatgaattcacgaggcgctacctaaatagctttcggggagaaccagctatctcccggtttgattggcctttcacccccagccacaagtcatccgctaatttttcaacattagtcggttcggtcctccagttagtgttacccaaccttcaacctgcccatggctagatcaccgggtttcgggtctataccctgcaactaattcgcccagttaagactcggtttccctgcggctcccctattcggttaaccttgctacagaatataagtcgctgacccattatacaaaaggtacgcagtcacaccccgaagggtgctcccactgcttgtacgtacacggtttcaggttctttttcactcccctcgccggggttcttttcgcctttccctcacggtactggttcactatcggtcagtcaggagtatttagccttggaggatggtccccccgtattcagacaggataacacgtgtcccgccttactcatcggactcacaacaccagtgctttcagatacagggctatcacctgctgtggccagcctttccagactgttctcttaacactgatgctgattaaggtcctgggctgctccccgttcgctcgccgctactgggggaatctcgtttgatttcttttcctcggggtacttagatgtttcagttctcccggttcgcttcattaccctatgtattcaggtaatgatagtgcaacgaattgcactgggtttccccattcggaaatcgccggttataacggttcatatcaccttaccggcgcttatcgcagattagcacgtccttcatcgcctctgactgcctaggcatccaccgtgtacgcttattcgcttaacctcacaacccgaaggtgtcttaatgcgacggactgcgctttgtgatttctttgtcgggcggtgctcgtgatgctcacatacctgagtatgctgcgctcactgcgctccggccttcgcgaaatcacttcgctcgccgcgtcttacactgaagaacacgttcaaagttgttcggctgagagactcatcaatattacctcggtgataatattgattgtttcaatttttcagcttgttccggattgttaaagagcataattgttaagctgactcttgaatcagcttaatcattatttgcagataactttcactcatccgcgcagactggcgtcccctaggggattcgaacccctgttaccgccgtgaaagggcggtgtcctgggcctctagacgaaggggacattagtcagcttcgcagacgctctctgctcattttctatcagacaatctgtgtgaacactcacaattcaaatcaacataggtaaggaggtgatccaaccgcaggttcccctacggttaccttgttacgacttcaccccagtcatgaatcacaaagtggtaagcgccctcccggaggttaagctacctacttcttttgcaacccactcccatggtgtgacgggcggtgtgtacaaggcccgggaacgtattcaccgtagcattctgatctacgattactagcgattccgacttcatggagtcgagttgcagactccaatccggactacgacgtactttatgagttccgcttgccctcgcggggtcgcttccctttgtatacgccattgtagcacgtgtgtagccctactcgtaagggccatgatgacttgacgtcatccccaccttcctccggtttatcaccggcagtctcctttgagttcccgccatcacgcgctggcaacaaaggataagggttgcgctcgttgcgggacttaacccaacatttcacaacacgagctgacgacagccatgcagcacctgtctcagagttcccgaaggcaccaaagcatctctgctaagttctctggatgtcaagagtaggtaaggttcttcgcgttgcatcgaattaaaccacatgctccaccgcttgtgcgggcccccgtcaattcatttgagttttaaccttgcggccgtactccccaggcggtcgacttaacgcgttagctccggaagccacgcctcaagggcacaacctccaagtcgacatcgtttacagcgtggactaccagggtatctaatcctgtttgctccccacgctttcgcacctgagcgtcagtctttgtccagggggccgccttcgccaccggtattcctccacatctctacgcatttcaccgctacacatggaattctacccccctctacaagactctagctgaccagtatcagatgcaattcccgggttaagcccggggatttcacatctgactcaatcaaccgcctgcgtgcgctttacgcccagtaattccgattaacgcttgcaccctccgtattaccgcggctgctggcacggagttagccggtgcttcttctgtcggtaacgtcaattgccaaggttattaaccttgacaccttcctcccgactgaaagtactttacaacccgaaggccttcttcatacacgcggcatggctgcatcaggcttgcgcccattgtgcaatattccccactgctgcctcccgtaggagtctgggccgtgtctcagtcccagtgtggctgatcatcctctcagaccagctagggatcgtcgcctaggtaagccgttacctcacctactagctaatcccatatgggttcatctgatggcgcgaggcccggaggtcccccgctttggtccgaagacattatgcggtattagctaccgtttccagtagttatcccccgccatcaggcagatccccatacattactcacccgtccgccgctcgtcagcagagaagcaagcttctccctgttaccgcccgacttgcatgtgttaggcctgccgccagcgttcaatctgagccatgatcaaactcttcaattaaaagtgtctgatgctcaaagaattaaactgtttactgctgcttattactaagctgctgtattggtcactcttcaagacttctcaaaaataatattttttgtgatatgtcctgcgagtgcccacacagattgtctgataaattgttaaagagcagttgcaacattcgctgccgttgccggtcttctgcgttgttgcgaggctgcgtatattacgtttccagccccttcgagtcaagcaatatttttcaacttttttcgctttcctctactgtcggcgcgcttctcagcgtgttgctccgtgtcagtgagggcgcattatagacactcgctgagatcacgcaagtgtttatttgaaaaaaatgtttgttcgcgttttttttagacaaaacaggtatatttgagcttttattcgcctgttttgtcattaatatgcccataatgcttcttatatatcattatcccgctttgttaatgcatcacaccaaggaatcagaatgcagttttcagaacaactcaatgcgtcacaaaagaacctgtcttatcttctggctgaaaaactgggacagcagattttatccggcaagtatccgccggaatctattttgccgggagagattgagttggcggagctgttcggggtaagccggaccgctgtccgtgaggcagtaaaaatgctggcggcgaaaggaatggttttaccgcgcccgcgcatcggcacccgggtgatgccggtgataagctggaattttctcgaccatgactttattaagtggtggctgagcagcggagaccaccggcaggtactgacgtatttccgcgagctgcgcgccgcgattgaaccccaggcctgcgcactggccgccatgaatgccggaaaagatcagaaacagtcactttcgtttctgttaaaagagatgaccttattatccgcccattttgagcgggataaatggatagccgttgatcaccgcttccaccaccttatttaccaggcgtgcggaaatccgttcttttcctctttcgccaatttatttgattttgtgtatcacaacttttttgaatccatcaccaccaatcaggttattgagattgatctccacaaggagattgtggatgccattatcgacgggaacggagaacgcgcccgtcaggcatgtcaggtgttgttgagtaaagtgtgaatatgtaatagttacactactgactattcagagataatgcattaagggaaaacatgtttaaaacagcccggaatatggcgggcctgccgtggattgccgcaatggcgttctttatgcaggcgctcgatgccaccattctgaacaccgctctgccggatattgccagaagcctgaaccactctccgctggcgatgcagtccgctgttatcagttacacactgacagtggcgctgctgatcccggtcagcggctggctggccgaccgcttcggtacccgcagggtgtttattatcgcggtaattctgttttccctcggttctttattatgtgccttttcacccaacctgccatttctggtggtgtcgcggattattcaggggataggcggggcaatgatgatgccggtggcccggctggcgctgctgcgggcttatccgcgcagcgagctgctgccgattctcaactttgtcaccattccgggattggtcggcccggtgctggggccgctgctcggcgggatcctggtgacttacgccacctggcactggatttttatcattaatatacctatcgggattctggggattatttacgccatccgccatatgcctgatttcaccatgccgaaacgccgctttgatacattaggctttgccctgctcggtgccgggctggtctctgtttctgtcagtctggatctgttcggggataatgctctggcagcggcaacgccgttcctggtgatgggcagcggttttgtactgctgactttctatgccctgcacgcccgccgtatttctgcgccgattattccgctgagtctgttccgcacacggacattcagtgtcgggatcgccggtaacgttgccacgcgtctgggcaccggctgtattccgtttctgatgccgctgatgttacaggtcggttttggttatccggctgtggtggcggggatgatgatggcgccgacggcgatcggctctattctggcaaaatcagcggtcacgcagattctgcgccgctacggttatcgcctgacattatttgcaatcacactggtgatcggcgcaatcatttcttctttctattttcagtcaccgggaatgtcgatttacctgctggtgctgccgctgtttattctcggtatggcgatgtccacacaattcaccgcgatgaataccattaccctcgcagatctgactgagcacaatgccagttccggtaacagtgtgctggctgtgacccagcagctttccatcagtttcgggattgcggtgagtgcgtctgtattacgctattttgagtctcaggattgggggtcaatcgttgataatttccacgcgacctttgtgacggtcggggtgatgacgattctgtcggcgtttgtgttcctgttcctgagccggactgacgggcggaatatgattaagaagaaaacccgcccctcagacagtccggcctcacattaacggcagataacagagccccggtttatcagtgccggggtcagcaccagtaaatcagaaggcgcgtctgcatcatccatgcggcgcagcagcttatccaccgccagtttgcccagctcatctttcggctggtgaatggtggtcagcggcggggtgagaaatgccgccaggtcgatatcatcataaccgacaaccgcaatatcctgcgggatacgcaaccctttctgccagatagcctgataagcaccgaccgccatcgcatcgttaccggcaaataccgcctgcggcggcagcggcagagaaagcagctgattcatggcactgaaaccgccactgaattcaaaatcactttccagtacatactccggcggcacatccagcccggcctgtgccattgcgcggtaaaaaccgtccagacgggatttggccggtgatttatccagtggcccggcaatacaggcaatccgggtaaaaccgttttcgatcagatgattggtggcaatttcgccgccgagaaaagagttgtcctgaatcacatccccgccgaacgcaaacggcgaccagtccatcatcaccatcggcagacggggatagcggctgaacacctccgctgacgggccttttatctcagtacacatcagcagcaggccatccacccgcttttgcagcagcgtttccagactgctgttcatccgtttgtgatccccttcggtattacagaggatcaggctgtagccgcgctcgtagcaactgcgctccacgccgcggacgacttccgcataaaacgggttattactggtggtcaccagcattccgatggtgtttgtgcggttcattttcaggctgcgcgcaagtgcagacggcgcatagttcagctcggcaatagcatcatttactttcttgcgcacgccgtcactgacaaaacggttattgttgatgacatgtgagactgtcgaggtggatacccccgccagccgcgccacatctttcatcgtcgccacagtcttaaccacgctccgcaaggaatgcatcaatttcacggcgccacggcaccgatggctgagcaccccggcgggtgacagcaattgcggcagcggcatgggcaaaacgcaccgcttcatctgccggttttccttccagcagcgccgtgacatacgcgccgttaaaggtatcgccggctgcgatagtgtccaccgcattaactttaaagcccgggatccggcggccttcaccgtttacgctcagccagacaccgcggctgcccagggtgatcagtacctgtccgatacctttatcatgcagtacctgcgccgctctggctgcgccggtttcatcactgacagaaataccggtcagcttttccgcttcggtttcattcggggtgataacatccaccagcttcagcaggctgtccggtaactcccgcgccggggccggattgaggatcactctggtctgatgattttttgcagcctgtgcggcggcaatcaccgtttccagcggggactccagctgcatcagcagggcatcggattgctcaacgagccctttataaggcgcaaaatgtgccggtgtcagcgcggcattggcaccggcactgatgccgatgacgttttcaccgtcttcattcacaaaaatcatcgccacaccggtagccgcttccggtaccacgctgactgcggcggtgtgaatacggtcgcgctgcagctgcgccaggatttccacaccgatggcatcatcccccacacaggcaataaaggtaatatcagcaccgctgcgtccgcaggccaccgcctgattcgcgcctttgccgccgaaggctgtctgatattgcttaccgatcaccgtttcgccgggtgccgggaactgtgcaatattcataatatgatcgacattaatactgccgagaacggtcagacgggatgttgtcattacctttatttccttaattactgacaatactccccggcacggtgtaccggggaggctgatatcgttagtcttttacaatcagttctaactcaaccggaatggttttgtcgattttttcgcctttcaggactttatcggcggtctgaataccaatgataccgatctggtcaggacgctgtgccacggttgcacccagtttgccgcctttcacagctttgatgccgtcagctgtaccgtcgaagccgaccaccagcacatcatcacggcctgcagtctgcaatgcacgctgcgcacctaatgccatttcatcgttctgggcaaatactgcctgaacagccggatgtgcagtcagcaggttctgcataacgttcagacctttggtacggtcgaaatctgccggctggctggccagtacattcattttatgcgcagcaaccgcctgtttgaaaccttcaccgcgctcacgggaagctgaagtcccggtgataccttccagctggataactttggcatccgcgccggttttacgggcaatataatcaccggccagtttgccgccgagaacgttatcagaggcaacgtggctgaccacttcacctttattggcaacacggtccagggtgataaccgggatattggctttgttagccaggatcaccgcgttaccgaccgcatcagagtctgtcgggttaatcagcatcagtttggtgcctttcacggtcagatcctgcacgttagccagttctttcgccgggttatccatggaatccagaaccaccaggtcgtaaccgagtttatccgcttctttctgcgcactgtctttcatggtaacaaagaacgggttgttcagtgtggagatcaccagggcaatggactcttttgccagtgcattggcgctgatagtggcgctcagtgcaacaacggagaaaagggtcgcaatctttttcagtttcatgtttctgttccttgcaggattcgggtaagtggattatttactgcttttgttatcaacgagtacagccagcaaaatcacaaccgctttaacaatcatctggtagttggaggagatccccagcagattcagcgcgttgttcagaaaacctaaaatcagcgccccgatcagggtgcccataatacggcctttacccccggcgagactggtgccgccgagtaccaccgccgcaatcgcatccagctcataaccgttaccggccatcggctgtgcggacgataaacgcgccacttcaatcacactggctaatgccgccagcagaccacagagagcgtaaacaatgattttaattttatcgacattaataccggacaggcgggttgcggattcattaccgcccagcgcgtagatataacggcccaggcgggtatgatgcagcagataccaggccgccgcgaaaacgacaatcatcagccagaccggtgccgggatgccgaacagacggccgataccaaaccagctgaacacatcggcgttatcactgaatccggtgctgatcgggctgccgtcggtatacacacgggtcacaccgcgcagtaacagcatcatcaccagcgtggcgataaaagcctgcactttccctttcgcgacaatcaccccggtcacaccaccgatagccgcacccagtgccagcgcacctgcaacagcaacaatggcgttaacatccgcacccaccatggaggccgccaccgcaccggtcagtgccagcagagaaccgacagacaggtcaatcccggaggtcaggatcaccagtgtcatacccaccgccataatggcgttaacagaggtctgctggagaatattgaacaggttattcagggtaaaaaagttcgggctgatcatggagacaatcacaatcaggatcagcagcgcgatcagtgatttctgctcaagcagccattctttggaaaaccagcgttttgacgccggggttgaatctgtacgcatatcttactcctgccctgcgccatattgtttgccgactgcggcggccattaatgcttcctgagtgacgttttccgcggcaaactccccgcttatccgtccttcgtgcatgaccagaatccggtcactcattcccatgacttccggcatttccgatgaaataaggatgatactcaggccttcctgtttaaatttgttgatcagctgataaatctctttcttcgccccgacatccacaccgcgtgtcggttcatcgaggatcagaactttcggccgcgtcatcagaccgcgtgcaattgccactttctgctgattaccgccggataagaacccgattatctgatccatgcccggggttttgatattgaacagctgaataaaatcgctgacagtcagatgctcttctttatgattaaggcgtccggtcttgctgctgaaatacggcagcgccgtcagagacatgttctcttttactgacatccccagcaccagaccatcgcgtttgcggtcttcggagatatacacgatgccgttatccagcccggctttcggtgagtttatctggcaggctttaccgtccatttcaaccgttccgccggtttttgccatcgcaccgtaaatgattttcatcagttcggtacgcccggcgcccatcagcccggaaacaccgagaatttcattctcatgcagcgtgaaactgacatcatgcacatcgcggccgcacaggttttttaccaccagcttctctttgccgcgcggcagagtcagacgcggatactgatcttccagtttacgcccgaccatcatttcgatcaggctatcctccgtcaggtcagacaccggtttttcaccgataaactgtccgtcgcggaacaccgtcacatcatcacaaatctcaaaaatctctttcagacggtgggatatatagacaatcccgcagccctgctcgcgcagttcgcggatcacactgaagagggattcggtttcggtgtctgtcagggcatctgtcggttcatccataatgatgacttttgactcaaaactgagcaccttggcgatttccaccatctgctgatcgccgatagacaattcagccaccagccggtggctgctgtaagtgagattcagacgggccagtaatttatccgcttcggcatacatttttttccagtcaatgttaccgaaacggccggtaaactcgcggccgaggaaaatgttttctgcaatcgtcagttccgggatcaggttcagttcctgatgaataatcccgataccggcttcctgagacgatttcggccccgtaaactgacgctcctgccccagaaacagaatctgaccggcatcttttttgtagatcccggtcagcactttcatcatggtggatttaccggcgccgttctctccgaccagcgccatcactctgccgggataaacccgcagggcagcaccggataaggctttcacacccgggaaagctttatcgatacctttgagttcaagtaacggttccataaacacctcagaatgtcacgccggagaacagcatcacattggcaaatggtgtgcactcaccggtccggatcacggcacggctgttttgtgtctgtaacttgaaagaggcgtgagtcacatactgaatctgaatcacattaccctgctgtaattccagtgctttcagatgtgccacgatagcatcgtgcagctcactgttatgtgtctggatatcttccgccatcagtgcggcttccacctgcatctcctgcgtgatgactttaaacaccgacataaaatcaggcacaccctgtgttaatgccagatcaatacgtggcgtagcgggcgggattggcagcccggcatcagcaacagtaatatggtcggtatgacccagacgcgcgataaccgcggagacatcaccgttcagtaaagcccctttcttcataaaatcctcctgagcgaaacgtttcgcttttaaactatggtaggaaaaatacgggaaaactcaatgttcatccataaaaaatgtgatggtgatcgaaacgtttcgcttaagaatatgttaaatgaaaaagctaactgattgaatgagttatagctgaatggattcaattataccggcagaaaaataccggttatccggcaacttcccccctgaaatcaccggttctccccccggatatcccggattttttatcactctgttacaccactaataagttatgacatcgcaaaacatatcccggtgttgttatgttgattttcccctctcataccggagatcttcttatgatgaaaaaaacggcatttgccggcatacttttctgtttactgacttctcaggcgtttgctcacggctatatcactgaaccggcctcacgggcagcaaattgccgtgacggtaaaaatcccgctgcaatgtgtggctccgcccaatgggaaccacaaagtattgaaacattctccggatttccggacggaaaattcccgccggacggccggcttgccagcggtggtattgagcgttttctgccactcgatacccccggtgataactggcatcagataacggtaaaaccgggaaccgccatgttcacctggaaaataacagccgcccacaaaacccgtaactggcgttactacatcaccaggccggactggcagccgggaaccccgctgacccgggcatcatttgaacccgaaccattctgtagttatgacgataaaaatcaggttccgccgcagacagtgacacatcagtgcaccattccggaacggagcggctatcaggttatttacggtgtatgggaaatcgcggataccgccaacagtttctatcaggtgattgatgtccggtttgactgatgttttgttttactgattaacagcattgccggtatccccggcaatttttttatcaccatttgcgcaaaaagcagaagaaacgtgatttcacgcagtaaacgcggtagcttttttggtttataaacgcagaaactgcatcagtaaattcacgggagtcccatgcaacgttctgaacgtatcgcccggctgagccgccacctggaatccgggctgtatgaacgacagcacgccatccggctctgcttgctggccaccctcagcggggaaagtgtttttctgctcggcccgccgggaattgccaaaagtatgatagcacggcgcatgaaactgattttcagtgacgcccgtgcctttgagtatctgatgacccgcttctccaccccggaggagatcttcggtccgctctcgattgcagcactgaaagatgaagggaaataccagcgcatcacgcagggatatctgccggatgcggaaatcgtgtttctcgacgaaatctggaaagcgggtcccgcaatcctcaacaccctgctgaccgcgattaacgaacgcaaataccgcaacggcgacagcgaaaatgctatcccgatgcggctgctggtggccgcctccaacgaactgccggacgatgacagcagcctggaagcactctatgaccggatgctgatccgtttatggctggataaacttcaggaaaaacagagcttccgcgccatgcttatcagcacaccgggggcatcggatgaacagatccccgcgcatctgcaggtaaccgatgaggaataccatcagtggcaggaagaaattgaccgtgttgtgctgaccgatcagatatttgaactgatttatcagctgcgtcagcagattgagcggctggataacgcaccgtatatctcagaccggcgctggaaaaaggcactgcggctgttacaggccagtgcgtttttcaacgaccacagcagtatcacacctcttgacctgattttgctgaaagattgcctgtggcatgattccgcctcactgaaatccgttccgctactgctgacacaactgatgtgtgagcaggcctatcaacaacgcagcctgctgctgaaactggaaaaatactatcaggaatggatcctggaaacgcagactcagcaacagcgggatgccttcagtgtgatccgcagcagtgcccgtttcgggcgcaaagtcagttacgctctgccggatacgctgccgcccggcccggtcaccctttttctgcataacccgctgacattacatgatatgacagtcactcatgtgactattgaacgcagtgcctttgataccttttttgataaaggcgtctttgataaaggtgggaacattgcggcaaaactcaacggcatcggctttacccagtctgtatccgccgcagtgaatgataacggccttctggaactgcgtgatgtcagtctgcgcagcagcaccctgttcccggcgggtaccgaaagccggatgacagaggcgcagaagcaaatctggctggataagctttcagcgatacgccagacactggtacagcagcgccagctgtttgcacagcatcagcccgccctgtttgtcagtgatgactggattgcacagatagaggaaagctttctgccggtgacagagcgcctcgataaactgactcagcaaatgagcagcaccccgtgttaagtctttcagcactggatctggcgctggcagttaatgaaggggaactcattgaggagatcctgctgacactgctggccgctccgcaactggcctggtttttcgaaaagcacccgcggttacgccgtgcggtgctgactgatatgccgtcatggcggaaatcactggaagaacgggtgaaagaggcgctggttccggccgctctggcagatgaattccgtctttaccagaaaagcaccgctgcagaccggacagaattttaccgcctgctgccggagatcctcaaagcgctggaggacatacactcgccgttctcgccggaagcacaccgcctgcacagagatgagcaggaaaccacctcccatcagatattattcaatcagcgctggcgtctcagcctgattttacaggtcaccacctatcataaagaaatcctggagcaggaaaaagaacagctcctcgccgaacttcagcagcacctggcgctgagcggcaatcttgatccgctgatcagtgaaaatgagcaggcttccggtaagttatgggatctggccaaaggatcactgaaatcccccggcccggcggacgatctcctgctgcgttacagcgaatttttaaaatcccagccggaactggaaaaactggcctcactgctggggcgcagccagacggcaaaatccgttcctcaggacagtgcggtgacagagccggtcaccattaccgagctggtgccggatcagaccccggaagaggtcagcggggtcggactgagtgatgatgtgctgcgtcttctgcccgccgagctggcgttactcggcatcagcggtctggagctggaattttaccggaagctggccgagaaacagttatacacctaccggttacagggcgatcactggcaggaacggcaggtgatgcggcctatcgttcatcataaagatgaaaaacagccgcgcggtcccttcattatctgtatcgatacttccggctcgatgggcggttttaatgagcgctgcgccaaagcattttgtctcgcgctggtcaaaatcgctatggccgataaccggcagtgccatgtcatgctcttttccactgaacaggtgcattatgattttctcggcccggacggcatcgagcagatgacccgctttctgcttcagagttttaaaggcggaacagacctggcatcctgtctgacagaagcggcaaaacgactggaaacgccgcagtggcgtgatgcggatgtggtggtgatgtctgactttattgcccagcggctgccggatgaggtggtgaagatggttaaacgttcgcagcagcagggaaaacaccgcttccatgcggtagccctgtcccattacggaaagcccggtatcatgcggatttttgatcacatctggcgttttgataccggcttaaaaaatcgtctgttgcgccgtttcaggcggtgagcctccgggctcaccgtacaacagtgtattacagcatgtcagtgatggtttcgcgcacttccggtgcccacacactgcattgtacctggccgatatggctgcgctggagcagtaacatcaccagacgtgactgaccgatcccgccgccgatagtctgcggcatttcaccggctgccagcgatttgtgccagtccagctccatccgcacctgctgaccggtcaggtccagctgacgcgccagggtgaccgggtcgacacggatccccattgaggataactcgaacgcatcctgcagtaccgggttccacacgaggatgtccccgttcagccctttgtagccgtcactgttctcagtggtccagtcatcataatccggtgcacggacatcatgggactcaccatgagataatttaccgccgatgccgattaagaagacggcacccagttctttcgcgatggcgcgctcacggcctttggcatccaggtccgggtagcgtgcaagcagctcttcagagtgaataaaatgaatttggtccggcaggaacggtgtcagaccaaattccttacttactgcaagttctgtttcttttattgtctgatatattttactcactgtctgcttcagataaggcagcgtacgctcctcatctgccatcactttttcccagtcccactgatcaacatagacagaatggattggggttaagcgatcctcatcaggacgcaacgctttcatgtcggtgtacagaccctggcccggctgaaaatcaaaacgccctaaggttttgcgtttccatttagccagtgaatgcacgacttcaaaggttgagcccggcaatgatttaactttcacctgaaccgctttctcgctgccggataaattatcctgagtaccatcacccacgcggcttaagattggcccctggacttcaataaggcccagttgtttttccagcagacgtgagaagtaagacttcacgaagctgatttgctgctgctgtcggatgaatgatttttccatgataataatccttgatatgcggaacatgtattgcctgtgaaatagattaagcaacagaatggggtataaattcaatatcctttatcaaaaataccctttgctatttataaaattcatttttatgatactaaaaatgaatattcgttaatttaagggacataaaatggccgaaatttatcagatcgacaatctggaccgtgacatacttcacgctttaatggcgaatgcccgcacaccttacgcggaattagcgaaaaaatttgccgtcagtcccggtacgatccatgtccgggtagagaaaatgaagcaggcgggtatcatcaccggcacccgggtggatatcagtgaaaaacagctggggtttgatgtgacctgctttatcggcatcatcctgaaaagtgccaaagattacccggccgctctcaagaaactcgataagctggatgaagtggtggaagtctattacaccaccgggcagtacagcatctttataaaggtgatgtgcaaaacgatagaatctctgcaggacgtacttatcaacaagatccagagtattgatgagatacagtccactgaaaccctgatctccttacagaacccgatcatacgaacgatccgcccgtaagaaaaaattcttataaccacattatccacaggtagatcccagctgtttcacagcgtacaatagcggctctttacagcaggggatcaccatgaccacagttactctcattaccggcagtaccatgggcagcgcagaatatgttgccgagcatgttgccgaaatcctggaaaacgccggttttaccacagatgtgcagcacgggccggaagcggacgacgtaccgcagcaggacagtacctggttaattgtcacctccactcacggtgccggtgatctccccgaaaatatacagccgttcgctgatgccctgcgcgagcagcagcctgatctcagttccgtccgttacggggctatcgggatcggcagcagtgaatatgacaccttctgtggtgcagtccgtacactggacgctctgctcacctctctgggtgcgaaaaaaatcggtcagtcactcgaaatagatattcagaaacacgagattcctgaagatccggctgagatctggatcgaagaatggaaaaatttactctgatttgctgataaaaacagcaatcaactgtggataactcggggatcaacttgcgatcaacccgtagttattcactgtataagatcactctccgtcaggccctgtgaataagtacccgttttgatcccagcttatactgaacaggatcaacggtacttcacaggaaatgatcctttacagttttatgatctttatggggatttaacacttatccacagaggatcgcgatcctaataaaagatctaataaagagatctttaaataaaaagatctttatataattacctgcgtctttaccgctcatggtcagacggcaagagttgagttatattctctcccccgatgcgctactgcattttgtaatgaaggtttaacatgttttatccggatcattttgacgtcattgttatcggcggtggccacgccggtactgaagctgcaatggcagcggcacgtatgggccgtcaaacacttttactgactcacaatatcgacactctgggtcagatgtcctgcaaccctgctatcggtgggattggtaagggacatctggttaaagagatcgatgcactcggcggactgatggcacatgccactgaccgtgccggtattcagttcagaaccctgaacgccagcaaaggaccggcagttcatgccacccgtgctcaggctgaccgcgtgctttaccgtctggcagtgcgcaccgcactggaaaaccagcctaacctgatgattttccagcagccggttgaagatcttatcgttgaaaacgataccgttaccggtgcagtgacccggatgggactgaaattcagagccaaatcggttgtactgactgtcgggacattcctggacggcaaaattcatatcggactggaaaactacagcggcggccgtgccggtgatccgccatcagtctcactgtcacaccgtctgcgggaactgccgctgcgtgtcggccgtctgaaaacaggaacaccgccgcgtattgacgcccggaccatcgattttgctcagctgacaccacaattcggtgacaacccgatgccggtattctccttcatgggcagtgcggatgagcatcctgaacagatgccgtgccatatcacgtacaccaatgaaaaaacccatgaagtgatccgcaataacctcgatcgcagcccgatgtatgccggtgtgatcgaagggatcggcccgcgttactgcccgtccattgaagacaaagtgatgcgctttgcggatcgtaaccagcatcagatcttcctggagccggaaggcctgacaagcaatgaaatttacccgaacggtatctcaaccagcttaccgtttgatgtgcagatgcagattgttcactcgatgaaaggcatggaaaacgcgcgtattgtgcgtcccggttatgctatcgagtatgatttctttgacccgcgcgacctgaaacagaccctggaaagcaaatacctgcacggcctgttctttgccggacaaatcaacggtaccaccggttatgaagaagcggctgcccaggggctgctggccggtctgaacgccgcccgctattctgccgatcaggaaggctggttcccgcgccgtgatcaggcgtatatcggcgtgctggtggacgacctgtgcacactcggcaccaaagaaccgtaccggatgtttacctcacgggcggaataccgtctgatgctgcgtgaagacaacgcagatgcccgtctgaccgaaaccggccgtgaactggggctggtggatgacgcacgctgggcacacttcagtgaaaaaatggagctgatcgagaaagagcgtcagcgcctgagagatatccgcgtccacccgcagtccgaaagcgtgaaagagatcaacgcgatcctgaacactcctctctccaaagaagcgaccggggaagatcttctgcgccgtccggaaatggactataaccgtctgatgaccctgagtgatttcgcgccgggggttaattcaccggcagcggcacagcaggtggaaattcaggtgaaatacgaagggtatatctcccgtcagcaggacgaaattcagcgccagcttcgtaatgagaacgccacactgccagttgatctcgattacaaacaggtgagcgggctttccaacgaagtggtggcaaaactcaacgaccacaaaccgacctctatcggccaggcatcgcggatctccggtatcacaccagctgctatctctatcctgctggtttggctgaaaaagcagggccttctgcggcggagtgcgtaacggatgagtgatttacagcaacaactttccgcgctgctgcgcagtgcggatatccggctgaccgatcagcagaaacaacaactgaccggttatgtggagatgcttcacaaatggaacaaagcctataacctgacgtctgtccgccagccggaacagatgctggtgcgtcatatcatggacagtatcgtggtcgaaccgcatctgaccggccgccggtttattgatgtcggcaccggccccgggcttcccggcgtgccgctggcgattgtccgcccggactctcactttgtcctgctcgacagcctgggtaagcgtgtacgcttcctgaaacaggtacagcatgaactggggctgagcaacatcgaaccggttcagagccgcgtggaagagtatcagggcgaaccatttgacggggttatcagtcgtgcatttgcatcactggatgatatgctcagctggtgtcatcacctgccggtaccggaaaccgggcgcttttttgcactgaaaggcagtgtgccggaagaggaattaacccggttaccggaggggatttctctcgtcagtgttgaaaaactggtcgtgccgcaacttgacgagcagcgccatctggtgattcttaaagcaaattgagtttgctgtacgtcaaaaaacagaaatatttttaaggggacggagtcagcgcattttctgcaccgtccctttgttttgccggagacgaaaataaaatgcgtaacggggccgttacaaagtgacaacggcagattggttactttccggtaagtttatctgcgaaaaatttcatgccggatcgtttttactgataacgcattatttcaaaattatttattttatttaaaattaatctgtaaatatcagttaaatgtttatttttttaattaactggttgatagatattgctatttttacaaccgctgatcgctataaaatgttaattcaactaatgtattttatgttatgtgatttttgtcacgtttcagaaatgagttgcacgtcgtattccgaggtagggtagactctattttttgtacgatttgtggcggcggcaaagaaattaaatttttattcactttttcgctacttattgattgaaaacaatctggctgcccgtataatttgcacgtttttgtctcttgacactctcgctcaaaggcagttttatacatcattcagtaagcctgaccccggaaggtgcacacggagaaactaaatgtcatgtctgtctcccttttcaacggaaaattgaccaaaaaactgttgtttttgcagtttatgacgtttgttgttcttagtgcgcttttttgcataaaaagtatcgagtggggtgcttccgcgctggccgggggagttgccgcatggataccgaatgcgatttttttgctgatcagtaaccggcagaaagcgcatgaggaaccgcagtcgtaccggattgcatggttttttgtggtaggggaagggtttaaagttatcttcgcgatagcgatactgatgattgctttaggagtgtttaaagcggcagttgcaccactggtcttgacctatttagcggtgcttttcgtgcagattatcgcaccggccgtgctaagcggttagcggttttaacaacaaagggtaagaggcatcatgtctgcatcaggagaaagtttaaccacaaaagagtatatcggtggccacctgaataaccttcagctggacctgaatactttcgagttggtcaatccccatgcgaacgcgactccatctttttggacgctgaacattgactcccttttcttctcagtcgtattaggtattttctttttatggcttttcagaagggtggcaaagaaagcgacaagtggcgttcccgggaaatttcagactgcggtagaaatgcttatcggcttcgttgacagcaacgtccgtgatatgtatcacggcaagagcaaggttattgcacctctcgcattaactgtgttcgtgtgggtgctgctgatgaacgcactggacttattaccaatcgacttcattccgtatatcggtgaacacatcctcggtttacctgcgctgcgtatcgttccgaccgcagacgtaagtatcacactgtcgatggcgattggtgtattcgttcttatcctcttttacagcttcaagatgaaaggcgtgaaaggatttgcaaaagagctgacattacagccttttaatcatccgttattcattcctgtcaacctgattctggaaggggtaagcctgctgtcaaaacctgtttccctcggtctgcgactgtttgggaacatgtatgcaggtgagctgatcttcattcttattgcaggtctgctaccgtggtggtcacaatggttactgagccttccgtgggcgattttccacatactgattattacgttacaagcctttattttcatggttctgacgatcgtctatctgtcgatggcgtctgaagagcattaattttattaccaataactgtgatttaactgaaacaaactggagactgtcatggaaaacctgaatatggatctgctgtacatggctgccgctgtaatgatgggcctggcggctatcggtgctgcgatcggtatcggcatcctcggtgggaaatttttagaaggcgctgcacgccagccggatttaatccctctgctgcgtactcagttcttcatcgtaatgggtctggttgacgccatcccgatgattgctgtgggtctgggcttgtatgtaatgtttgcggttgcgtagtgatacgcccactcccggatatttacatcaactcaattagataaagaggtattgtgctgtgaatcttaacgcaacaatcctcggccaggccatcgcgtttgtcctgtttgttttgttctgtatgaagtatgtatggccaccgatcatggcggccattgaaaaacgtcagaaagaaattgctgacggtttatcttccgcagaacgtgctaaaaaggacctggacttagcgcaagccaatgcgaccgaccaaatgaaaaaagcgaaagcggaagcatctgccctgatcgatcaagcgaataaacaacgcgctcagatcatcgatgaggcaaaagcagaagcggaagttgagcgtagcaaaatcatagcacaggcgcaggcggaaattgacgccgaacgcaaacgtgctcgtgaagagttacgtaaacaggtcgccattttagctgtcgcgggtgccgagaaaattattgaacgttccgtggatgaagctgctaacagcgacatcgttgataaacttgtcgctgaactgtaaggagggtggggcatgtcagaaatcgttactgtagctcgcccctacgccaaagcagcttttgactttgctgtggaaaaccgggccgttgaaaaatggcaggatatgctggcatttgccgctgaagtgacacgcaatgagcagatcgacgatctgatttccggttcttttgctccggaaaccctggctcaggcgtttatcactgtttgcggtgagcagattgacgagcatgttcagaacctggttcgtatcatggctgagaatggtcgcttagtgaccctgccggaagttagccgtcagttcgcaacactgcgggctgcgctggagtcaactgttgaggttgaagtcacttcagccggcgaactcaatgaacagcagctggcgaaaatttctgcagcgatggaaaaacgtctgtcacgcaaagttaagctgaattgcaaaattgataagtcagttatcgcggggtttgtattgcgcgccggtgaccttgtcatcgacaacagcattcgcaatcgactcgagcgtttaaccgacgtcttgcagtcttaaggggactggagcatatgcaactgaattccaccgaaatcagcgaactgatcaagcagcgcattgctcagttcaatgtcgtgagtgaagctcacaacgaaggtacgattgtctccgtcaacgacggtatcattcgtatccacggtttagccgaagttatgcagggtgagatgatctctctgccgggcaaccgttatgctatcgcactgaacctggagcgcgactctgttggtgcggttgtgatgggtccttatgccgacctggcagaaggcatgaaagtcaaatgtaccggtcgtattctggaagtgccggttggccgtggcctgttaggccgtgtggtcaacaccctgggtgagcctatcgatggtaaaggccaggttgagcacgatggtttctcacctgtcgaagttatcgcaccgggtgttatcgaccgtcagtccgttgatcagcctgtacagaccggttataagtctgtcgatgcgatgattccaatcggccgtggtcagcgtgagctgattatcggtgaccgtcagaccggtaaaaccgcactggcaatcgatgcaatcatcaaccagcgtgattccggcatcaaatgtatttacgtcgcaattggtcagaaagcgtccactattgctaacgttgtccgtaaattagaagagcacaatgcgctggccaacacaatcgttgtggtcgcgagtgcgtctgaatctgcggcactgcaatacctggctccgtattccggttgtgcaatgggtgaatacttccgtgaccgcggtgaagacgcgttaatcatttatgatgacctgtcaaaacaagcggttgcttaccgtcagatctccctgctgctccgtcgtccgcctggacgtgaagcatatcccggtgacgttttctatctgcattcccgtctgctggaacgtgctgcgcgtgttaacgcggaatatgtggaagcgtttaccaagggtgaagtgaaaggcaaaaccggttctctgaccgcgctgccaatcatcgaaactcaggcaggggacgtatcagcgttcgttccgactaacgttatctccatcactgatggtcagatcttcctggaatccgcgctgttcaacgccggtatccgtcctgcggttaacccggggatctccgtatcccgtgtgggtggtgcagcacagaccaagatcatgaaaaaactgtccggtggtatccgtaccgctctggcacagtatcgtgaactggcggcgttctcacagttcgcatctgaccttgatgatgcaacccgtaaacagcttgaccacggtcagaaagttaccgagttgctgaaacagaaacagtatgcaccaatgtcagtggcacaacagtctctgtcactgtatgcagctgagcgtggttacctggaagatatcgaaatttcgaaagtcgtgccgtttgaagctgctctgattggctacgccactcgtgaacatgctgatcttctgaaagaaatcgaccagacgggtagctataacgatgatatcgaagcgaagttgaaaaacgtgctcgataccttcaaggcgactcagtcctggtaatactaaacggcctgtgtgaacagtacaggccgtctggttcatgaggagagcaaatggccggcgcaaaagagatacgttctaagatcgccagcgtacaaaatacgcagaagatcactaaagcgatggaaatggtcgcggcgtccaaaatgcgtaaaacgcaggaccgcatggcggccagccgtccttatgcagagaccatccgcagtgtgattggtcacattgcattaggtaatctggaatataaacatccatacctcgaagaacgcgaggttaagcgtgtcgggtacctggttgtttctaccgaccgtggtttgtgtggtggtttgaacattaacctgttcaagaagctgattgtcgaaatgaaagactggtctgacaaaggtgttcagactgatctggctctgatcgggtccaaagcaacatcattcttctcctctgtgggcgggaatgtggttgctcaggtaaccggcatgggggatgacccgtcgctggctgaccttatcggttcggtaaaagtcatgcttcaggcctacgacgaaggtcgtcttgacaagctgtacattgtaactaaccggtttgtgaataccatgtctcaggttccgaccattgttcaggttctgccgttaccgccaagcgatgacgaaaacctgaagaagaaaacctgggattatttatacgaacctgatcctaaagcgttactggattcccttttacggcgctacatcgaagcgctggtataccagggcgttgtggaaaacctggccagtgagcaggccgcccgtatggttgcaatgaaagctgcaactgataacggcggtaacatgatcaaagagctgaatttagtttacaacaaagcgcgtcaggcaagcattacacaagaactcaccgagattgtgtccggtgctgccgcggtttaacacccgggttttacgaattacgtagaggattcaagatggctactggaaaaatcatccaggttatcggcgccgttgtggacgtcgaatttcctcaggatgcagtaccgaaagtgtacgatgcgcttgaggtaacaaatggtaaagaaaaactggtgctggaagttcagcagcagttaggcggcggggttgtccgttgtatcgctatgggtacatctgatggtctgagccgtaatctggaagtaaccgatttaggccacccgatcgaagtccctgtcggcgtgaaaaccttaggacgtatcatgaacgttctgggtgatccgatcgatatgaaaggtgacatcggcgcagaagaaaaatggtctattcaccgtgctgcaccaacatacgaagaactgtctaactcccaggaactgctggaaacaggtatcaaagtaatggacctgatctgcccgttcgcgaagggtggtaaagtcggtctgttcggtggtgcgggtgtgggtaaaaccgtaaacatgatggaactgatccgtaacatcgcgatcgagcactccggttactctgtattcgcaggggtcggtgagcgtacccgtgaaggtaacgacttctatcatgaaatgacagactccaacgttctggacaaagtatcactcgtgtacggccagatgaacgagccaccgggaaaccgtctgcgcgttgctctgaccggtctgaccatggcggaaaaattccgtgatgaaggccgcgatgtactgctgttcgttgataacatctaccgttataccctggccggtactgaagtatccgcgctgttaggccgtatgccttcagcggtaggttaccagccgacactggcggaagaaatgggtgtgcttcaggaacgtatcacatcgaccaaaacaggctctatcacgtctgtacaggccgtttacgtccctgcggatgacttaactgacccgtctcctgcaaccacgttcgcccaccttgatgcgaccgtcgttctgagccgtcagattgcgtctctgggtatctaccctgcggttgacccgctggattccaccagccgtcagcttgacccgctcgttgttggtcaggagcactacgatgttgcccgtggcgtacagtcaatcctccagcgttatcaggaactgaaagatatcatcgcaatcctcgggatggatgagctgtcagaagaagataaactggttgttgcacgtgcccgtaaaatccagcgcttcctgtctcagccgttcttcgtggcagaagtcttcaccggttcaccgggtaagttcgtttccctgaaagacactatccgtggctttaaaggtatcctggaaggtgattacgatcatctgccggagcaggcgttctacatggttggtaccatcgaagaagctgtggaaaaagcgaagaagatttaatccggttgacaggaggctgatatgtctgcaatgacgtttcacctgacggtagtaagtgccgaaaaacaactgtttaagggcttagtccagaagattcaggtgacaggcagtgaaggtgagctgggtatttacccgatgcataccccgctgctgactgccataaaaccgggcatggtacggattgttaagcaatttggcgaagaagagcttatctacctttcaggcggaatgctcgaagtacagccaaacggcgttatcgtacttgcggacacggctatccgtgcaaacgatctggatgctgcactggcgatggaatcaaaacgccgcgcggaagaaaacatccggaaagcacatggtgacgtggattatgctcaggcatcagccgaactggcaaaagcaattgcaaaattacgtgtaattgacgaattagccaagaagatgatgtaaccgaggcagttaaaatataaaagccagtcagtatccgctgactggcttttttgcgttgcgaaatatgtggtattttcgtgtgtaaacaggtttacttggcactctaaaagaggagcgatcagatttcttatgtctacgaatgctaaaagtgtggtaattctcgctgcgggtaaaggtacccggatgtactccgcgctgccgaaggtgttacatcacctggcgggtaaaccgatggttcagcatgtgattgatactgccctttcactgggcgcacagaatgtgcatctggtttacggacacggcggtgatttattacagaatacgctgtcggatcagaatctgaactgggttttacaggcagaacaactgggaaccgggcatgcgatgcagcaggctgcacctcactttgccgatgacgaagatattctgatgctgtacggcgatgttccgctgatcgcggctgaaaccctggaacgcctgatggcggtcaaaccggaaggcggcattggcctgctgacggtgatcctggataacccggcgggttacggccgcatcatccgtgaaaacggactggtgaccgggattatcgaacagaaagatgcctctgaagagcagcagaaaatcaaagaaatcaataccggtattctggttgccaatggtggtgatctcaaacgctggttagcaaaactgaacaacaataatgcgcagggtgaattttatatcaccgatattattgccattgcgcatcaggaaggacgtcgtattgagacggctcatccggaaaaactgagtgaaatggaaggggtgaataaccgccttcagctcgcggcgctggagcgtatttatcagcgtgaacaggctgatcgtctgttgctcgaaggtgtgatgattctggatccggcgcgttttgacctgcgcggcactctgacacacggcaaagatgtcatcattgacgtgaatgtcattatcgaaggcaatgtgactctcggtaataatgtggtaattggcgccggttgtgtgctgaaagattgcgttatcggtgatggctcggtgctcagcccgtataccgtggttgaatcatctgaaatggcccgcgactgtactgttggtccgtttgcccgtctgcgtcccggctctgtgctggcagacaaagcccatgtcggcaactttgttgaaatgaagaaagcgacactcggcgtcggctccaaagccggacatctcagctacctgggggatgcggaaatcggtaacgatgtgaatatcggtgccggaaccatcacctgtaactatgatggtgcaaacaaattcaaaacggtaatcggcgatgatgtttttgtcggctctgatactcagctggtggcaccggtcactatcgggaaaggcgcgaccgtcggtgccggtacaaccgtaacaaaagatgtgggtgataatgaactggtgataagccgggtcagacaaacccagatttccggctggaaacgtccggtaaaaatgaaaaagtaaatacaataataaccccatatctacacagcccggggacacggcaacgccgtaaaaacaatcaggcaggacatcgttaaatcaggaatttacaactatgtgtggaattgttggtgcagtagcacaacgtgatatcgctgaaattctgttagaagggcttcgtcgtctggaataccgcgggtatgactctgccggtatggcggttgtggacagcgaagggcacctgacccgcctgcgtgaagtcggtaaagtgaaaatgctggcggaagaagcagaaaaaacgccggtttccggcggcaccggtatcgcgcacacacgctgggcaacgcatggcgagcctctggaacgcaacgcacacccgcatgtttccggaaatatcgccgttgttcataacggtattattgaaaactacagtgaattacgggaattactgaaaggccgcggctatcagttcacttccgacactgacactgaagttatcgcacacctggtgaactgggaacattcacagggcggtacgctgcgtgaagccgtacagcgcgctatcccgcaactgcgcggtgcatacggtacggtgattatggattcccgcacaccggaactgctggttgctgcccgttcaggcagcccgctggtggtcggcctgggtgtcggtgaaaacttcctcgcctctgatcagctggcgctgctgccggttacccgccgctttatctacctggaagaaggggatatcgtcgaaattacccgccgtcatgttcatatttttgaccgcaatggtgatgaagcagaacgcgatgtgattgaatccaacgttcagtatgatgccggtgataaaggtatttaccgtcattatatgcagaaagagatctatgagcagccgctggccatcaaaaacacgatggaagggcgtctgcgcaatgaaacggtcgaattcagcgagctgggtgaaaaagcccgtgatgtgctgtccggtattgagcatatccagattgttgcctgcggtacgtcattcaacgccgggatggtctcccgctactggtttgaagctctggcaggtataccgtgtgatgtggaaatcgcctctgaattccgttaccgcaaaccggcctgccgtaagaacagcctgctgatcaccatttcacaatccggtgaaaccgcagataccctggcggcactgcgtctgggtaaagagctgggctatctgacttctctggctatctgtaacgttgccggttcatcactggtgcgtgaatctgattttgctgtgatgaccaaagccgggactgaaatcggtgtggcctccaccaaggcattcactactcagctgactgttctgctgatgctggtggcttacctcggccgcctgaaaggcaaaggtgaagcgctggagcacagtattgtgactgcactgcatgcgctgccgagccgtattgagagtatgctgtctcaggataaagtcattgagcagctggcggaagatttctcagacaagagccacgcactgttcctgggccgcggggatcagttcccgatcgcggtggaaggcgcgctgaaactcaaagagatctcctatatccacgcagaagcctatgccgccggtgaattaaaacacggtccgctggcactgattgacgcggatatgccggtcattatcgtggcaccaaacaacgaactgctggaaaaactgaaatccaacattgaagaagtccgtgcccgtggtggtctgctgtatgtcttcgcagataaagacgccggtttcagcgacagcgaaaatatgaaaattattccgctgccgtatgtggaagagcttattgctccaatcttctacaccatcccgttacaactgctctcttatcacgttgccttaattaaaggtactgatgtggatcagccgcgtaacctggcgaaatcagtgacggttgaataagctgagcctgatttagtttcagataattaattagtaaagcccggcgcgtatcaccgtgatacacgccgggctttttctatcccgccattctcatccttaagaaaaacaacatcattatttgactaataatcatatttataaactaaatgtgattaggttcacttacttatcagtaatagaatttgaatttatttctttaataaccaattatatagaaagccaaaagaaaaaataaattaagattcaggcactaaaaatatcgcaaaataccaatactgtagtaagttatgcttaaacatatcagtataagaaccgtcattgtcgtctttctcatctgtaatttcactacaattaatattatctttctcttgcccctgtccgcactaattaaattagtaatgcttaatattgttagtgtttttacgttcgcctgctcatggttttacattacgaagtatctggttatgccgatcaatgccgtgaaaaacagtattgatgaggttaacgccggtaacttgtcggtgcggatcccggtatttggtaataactgtgccggacgcctgatccccggggtgaatcagctggcggaaagcctttctctgctggtcagtgaaattcgcagctcatcagattccgcatctgtgttgtctgagcaactggcaatgcgcagttttgagctgtctgccaagacggagcagcaatcagccatgctggtggaaacagcggccaatatggaggagattgccgccgggactaaaaataatgcggagaatacggtgctggtcagtgagcatgcacaggaagcaacggtgtttgccggacatggcggtaagctgatggaggaagtggccaccaatatgcattctattaatgaatgcaccaataagatgactgaaattatcaccctgattgattccattgccttccagaccaacattctggcgctgaatgccgctgtagaggccgcccgtgccggtgagcacggcagagggtttactgttgtggccggtgaggtcagaaatctggctcaccgcagttcagaatcagcgaaaaatattaaatccctgattgcggtgacaaccgataatgttaagcagggagaggatattgttcaccgcgccgaagtgaatatgaataagattgttgagggtgcggagcgggtaaacggcctgatggcgcagatctctgtttccacacaacagcagcagcaggggattgagcagatagcaacggccctttccgagctggaacaggcaactcagggcagtgtgatgatcgccgatgagcttgccggttcttctgatgcgcttaaggctcaggttgcggatttacagtcacggacacgggatttccgcctgacgaatcacaccgctgctcagccacacagcaaaccggcattaaacaccggtaaacgggttgcgcggtttgccgcatcagctcaggcatgattgccgaaaacctgaattgcctgctgtaatcgcgaggagcgccgtgtcagttcagaggtggcaccggtgacattattgaccatttcagtattgttgccggtcatggtgccgatacgggcgacggattcattgataagttccagtgcctgagtctgttctttggtggcaagaccgatttcattgatcatggatgacattttcagcacatcggtgaccatttccccgagctgggtttcggtctgctctgccattgtcacgccggtgcggacattggccgcgtttttctcaatcagggtttttatctctttggcggcagaggcggaatgcagcgccaggttgcgcacctctgcggccacaacagaaaagccccgtccggcatcccctgcacgggcggcttccaccgacgcattcagcgccagaatgttagtctgaaaagcaatacggtcaatcacaccgatgatatcaacaatctgattattatccgcagaaatggtatgcatcatatcgatggttttctgcatagtttcgttgctttgtgttgcgctgttactcgcattaccggcgatattcatcgtcagataaacactctcggcagtctgctgcaccgcactgctgatttcctcaatggcgactgcggtttgctgcagatgggcggatgcctcttcagagcgggtatgcagcgcggtggtttcctgtgaaacccgctggttgatagcgcggatcccggcaacctgtgtgctgacatcatccaccagcgagttcagattaagcccggattgattcaccaggcgcatcagtaatccgatctcatcaaccctgtccatatgcaccggatccggtttccgtccggaaacgacttttttcatctgtgacagcagtaatttaaccggctgagagacttgtgactgaaggtaaaccgacagcagaataaataaagccgccacaccgcccgcctgaataaacggatttaacggtgaaaataccagagccagggttaataacattacagttaataaggaataattaatccgctgcccgaccggcagccatttcagtaatgataaaaatgccagtttacctttacggataataatacctttaaaaagacgatatccgtttaatttattactctttaacctgctgtaaagtgaggcgcttttttttatttcatcacgggttggtactgtccggacagaaatatagcctgtcagttttttatcgtgccagaccggggtgacatttgcccgcacccagtaatggtcgccgttacggcagcggttcttgataatacctgtccagctgtcaccctgctgcagggtataccacatatcggcaaaggctgccgggggcatgtccgggtggcggataatattatgaggctgtccggttaattgcccttcctcaaacccgcttgcggtaataaatgcagagtttgcataggttatatggctctgagtgtcagtggttgacattaatattgcattatcgttaagcgagtattcatgctgtgtgacaggcatgttgtttttcatgataaccccgggtgatataaaataattaacaaatagccctccgcactgtaaaaaaacagtacagaatggttgttttattttttggctaatatattagcaattgaccgggaaatatagatttttttatttttaaaaattattttttgtcatgaaaatgaaacaatttaagcgatctttaattattaaattaatattatggttgttcttttttattgatgtgacaacggtttttatgttattcgttttttatatcggataggaattttaaatttaaataaatctcagtttcggaatttttaaatcattacttaaccgtaattttcagtcaagacaatggcggcatttttaaggtaaatgtgtgccggttatctggccggatgatccggaatgtggcgcagcgtcatttcggcgatattcagtgattccggcagagcgatacggtaagtgcagaacacttttctcaggttcatgtccacaacgacggtgtcgggtgggcaccacaccagtaattgaggttatccggtgtctgcggcgggtgtgatgacaccgggtcattatccccggcgtactctgcccgtccctgccaggtccggccgaaaaaaccgaaaccgtccgggcggagtatctgactgatatgctctgccgggatatccggggattctatctgatgcgccggtaactgtgttttatcacactgagccagaaattccgccggataccagcccataccaaccgggtttgccggagaggtaaaaaccgtatcaccggcgctgtatgtaccgccggaggcatgctcataacggatatcaagataactgatcggttcagattctgtgagaaaccactcgtcatcctcctttacccagtaacggggaccgaatatgcgcaggactttctgatattttccgatctgaataccgacatcaaaaaccggaaccggattattttccgggacaaatgctgtggcgttaatgacaatatcagtttttggtttataaggggctaaatcactttcgtattcaatactggtatcaaccatttcattgtagctgacatccgtataattcagcagggattgttctggggaaataacaagctggctctgtccgtcacggttatttatccggatatcataggtaatacgtgatgcaacgatatgaaatgtatcatgttgctgattatcgctgtcataattcagcgccggaaaaatagtgtggttgataaaattcatgacattagcctttataacagataaaaaatcacaaaaatacgcaatttccctcaggctgatgtaatacaaggcagatataataatatcctatgtataaacacgatatttttacggattcagccggtttttaatatcgctaatgtagtcttttcccgggaaaagaatataaaagttagccgatattctttttattatttaccgcccgcaccgcaggcggtaaataaaggtttatcagccggaaaaattgagacaggctgcgccccgggcgccaccggaatccccgtaacgggctttatgaatggcgggcagtgaggcaacgccatagagatactgcggcagatattccggcagcaggcggtaaatctcctcaaattgtgataatccgccgccgatcaccagcaaatcaggatcaaagacactcagcacatttcccaggtagtgtgcaagcagcgacatataccgctcaacgtgcagttttgcattatgatcaccgtcgtagtaacgggcgataatatcaaccgcactgagcttttcgccgtaaaatgccgtgaaaatccgctcaaatccggggccggaaagataggtttcaaaacagccggtttttccgcagccgcagagggtctccggaacctgatgcccgagaagcttatccccttccagcgtcatattgatgtgaccgatttcaccggcaatcccgttttttcccggtaacacggtgccgttaatcacaaagccgccgccgacaccggtaccgaggatcagccccagtactgtcggatagtggcggaatgccggatcccaggcttcggagagtgcaaagcagttggcgtcattttcaatttttaccgggcgctgcaatatggtttccagatcatgacgcagcggctgatactgagcggcaggcacattggtggtaaacaccgttcctttttcatgattcacaatgccgggaacgccgatgccgatttttcctttgcatccgagttcgctatccgcctgttctgtcagttgtctgagtgcttcaagcagcgcggcgtagctctctttcggtgtcgcaatacgcttttgccagaccggttccagtgcttcattaaaaacggcaagctcaatttttgtcccgcccatatcaaaaccgtaatacatgatgattccgccctgttctgatcactgttgtgttatccccagcataaagcaccggcggccggatgagaacccgtcgtctgatataagtcccgcttctgaacagcgggggatcatcaataaattcacttgcaccgttatctatattttgtcaggttaagagtattgcaaacgcagttcagatgagaataaaaggaaacatcgcgatgaaaaatgtgggatttgtcggctggcgcgggatggtggggtctgtgctgatgcagcgcatgacagaagagcgggattttgacgggatccgtccggtatttttctcaacctcgcagagcggcggggaagcgccgtcatttggcggacactgcagcacgttacaggatgcatttgatattgatgcactgcgcgcgctcgacattattatcagctgccagggcggcgattacaccaatgatgtttatccgaagctgcgtcagagcggctgggacggctactggattgatgcggcatcagcactgcggatgaatgatgacgccattattattctcgacccggtgaacggtaagcatatagaagaagggctgaaccgcggcattaaaacatttgtcggcggtaactgtacggtcagcctgatgctgatgtcactgggcggcctgtttgaggcggatctggtggagtgggcctctgtggcaacctaccaggcggcatccggtgccggtgcgcgtcatatgcgtgaattgctggtgcagatgggggcactgaatgcccatgtggtgaaagagttacaggacccggcctccgcgattctggatattgaacgcaaagtcactgaatttacccgcagtggtgcattaccggcggaacagttcggtgtaccgctggccgggagcctgatcccgtggattgataagcagctggataacggccagagccgcgaagagtggaaagggcaggctgaaaccaacaaaattctgtcacgcggtcagaatattattccggtggatggcttgtgtgtccgtatcggcgctctgcgctgtcacagccaggcatttaccctgaaactgaagaaagatctgccggttgcagagattgagtctctgctggctgcccataatgagtgggttcgcgtggtaccgaatgatcgcgatattaccgtgcgcgagctgaccccggcggcggttaccggcacactgaaaacgccggtcgggcgcatccgtaaactgaatatggggccggattatatctccgcgtttactgtgggtgaccagcttctgtggggtgctgcagaaccgttacgcagaatgctgaatattttgctgaaataacgataataatctgaagatagatttcgatgtagacctatgtgttgattttttcacatgggtcattttttttgtttgcgtttttctttttttgcagaatctgcatcttctcactgactgaaccggttaaacaaccggatgtgtgtgttttcttcagctgaaaaatgcctgtcaggtctatattaccggaattattgatacactccgtttattgtttgttatttgcgcaaaatgcaccggtaacatttcgttcctgtcccgtttttattttattgttaaaactgtacacataatatgttgtatatccccggggctgttttatagcagctatttaatctttctgagaattaaaatccgcgtcagcagccggagagactgacttaatgtttatatttagttgtatgttttaaatcacccgctgtatctgtccctttcctgtttttttgtctgctgttcccggcgctgtaaaaatggcttgattcgggtaataaaaaaaggcgctgatttctgatccttcgtaccacccgctttttcctgtcattcattcttctttcgttaattttagtctgtaagtttcttatataaacagatccgggtttcacaaaaccgtaacgaaataaataaatgtttcttttgtgttaatccggttttttattaacgaaatttatttattatcgcaatggttaaatcagatcacataagaaaacataattattaacctgttttacgggtttgaaaattgcgcatttcataagctaatatacttaggttgcttcactgaatgcacattttcagcaggagatatcctgtttttccgtaaattcccgtgttcagaatgacagcagcgttaattaattttaactatcaataagtgatctgagaaggaggttttatgtctcttcatgcagtgaaaggtaaaaatagttcagaatttattgatatttacgcatcaacggactcggatgcaaaactccctaaatacaaaatgccggacgacagcagtgacccgcgaattatttacagcgtggtccgtgacgaattactgctggatggtaactcccgtcagaatctggcgacattttgtacaacatgggttgaggatgaagtcaaacagctgatgaccgacagtgtcgataaaaacatgatcgacaaagacgaatatccgcaaactgcagaaattgaaagccgctgtgtgcatattattgccgacctgtggaattccccgcaggcacaggaaactatcggctgctctaccaccggctccagtgaggcggcaatgctcggcgggctggcaatgaaatggcgctggcgtaaaaaccgagaaaaacaggggaaagagaccggtaagccaaacctggtaaccggcccggtacaggtgtgctgggaaaaatttgcccgctattttgatgtggaactgcggcagatcccactggaaggtgatgccctcggtatgcagccgtctgacctgcgcaaatattgcgatgaaaacaccatcggtgtggtggcgacactgggggtcacgtttaccgggatttatgaaccggtggcggaactggcaaaagaacttgatgcaatacaacgggataccggccttgatattccgctgcatgttgatggtgccagcggcgggtttatcgcgccgtttatccagccggaactggtgtgggatttccggattgagcgggtgaaatccattaacagctccggacacaaatacggcctgtcaccgctgggtgtcggctgggtggtctggcgcagcaaagaagacctgccggaagagctggttttcaatgtcgattatctcggcggcaatatgccgacatttgcactgaacttttcccgtcccggcgggcaaatcattgcacagtattataatttcctgcgtctgggacgcgccggttataccaaaattcagcaggcgtgtgcagatactgcgcaatggcttgcggatgaactgaacaagctggggattttcgacctggtgtatgacggccgcggcgcactgccggcggtggcttacaagctgaaaccgggcgtgacacagttcaatctgtatgacctttccgaccgcatccgcacacgcggctggctgatagcctcttatccgctcccggcggacagagagaaaaccgttgttcagcgcattatgatccgtcacggcgtcagccgcgacctggctgcactgctgctggatgatattaagcgggctatcgatcacttcaggcaaaatccggtagtgaactcgactgccaaagccaccttccatcacggttaatttttatacaatgacctccggccggtatcagcggccggaggatctcactcattatcctccggggtgcttttatgactgatacttcaaccaaaaaaccgtcttccggtgcagcaaaactgactgtcggcacacttatcgtcatgaatattgtggcggtggtgagcctgcgcggtttgcctgccgaagcggaatacggtctcagtgcgattttttattatctgtttgcggcagtgtttttcctgatcccggtatcactggttgctgctgaactggccaccggctggtcagagaaaggcggggtgttccgctgggtcggcgaggcgttcgggccgcgtctggcgtttctggcgatggcgatgctgtggattgaggtgacggtctggttcccgaccgggctgacattcggggcggtatcactcgcctttatcgatccgcatcagacattcgatgaagcgctggcggcgaataaattctttgtgctcggtattgtcctgtttatctactggctggcgacctttattgcctttaaaggcgtgggcgcgtttgcccgggtatcaaaatggggcgggattatcgggacgattgttccggcgatcattctgattgtacttggtttctcctacctgttcagcggccagacgccgcagattgaccttgcgtgggatcaggttctgccggatttctcaaacttcgataacattgtgctggcggccagtattttcctgttctatgccggtatggaaatgaacgccattcacgtaaaagacattgataacccgaccaaaaactacccgaaagccatcattctggcggcggcgggtacggtggctatctttgtgctgggtacgctggcgatcgcctttatcattcctcagtccgatatcagcctgacccagagtctgctggtggcttacgatgacatgttcaaatgggcacacattccgtggatggggccgattgtcgccgtcatgctggctatcggtgtgctggcgagtgtggtgacctgggttgccgggccgtcttccggtctcctggaagtggcgaaagcgggctatctgccgcactggttccagcataccaacaagaacgggatggcaacacatatcctgctggtacaggctgtgctggtctctctgctggcggtactgtttgtggtgctgccgtccgtgcaggcggcttatcagatcctcagtcagctgacggttattctctatctgattatgtatatgctgatgttcagcgccgcgatttacctgcgcttcagtcagccgcagcgtgcgcgtccgtaccggatcccgggcggtaatgcggggatgattatcctcggcggtatggggctgctcggctcattaaccgcgtttctgttcagctttatcccgccggctcagattgcggtcggcagcccggaagtgtatgtgggggcgctgatcggactgaccgttctgttcgttcttcttccgtttgttgtttatcagatccgtaaacccggctggcgtgatccggacagtgatttcgcactgtttacatgggaaaacaaaggaaaagcatcatgacagatttaacagcaatcaaacaggcagtgaccaatgcctggcagcagtttcatcaggctcccggcggtgcgaatgcggattatattccgttcctggctaatatcccgtccgacctggcggcggttgcggtagtcactgctcagggcgatattatcagcagcggtgatgctgattaccggtttgccatcgagtcaatttccaaagtctgcacgctggcactggcgctggaggatatcggcccgcaggcggttcaggatcagattggtgcggatccgaccgggctgccgtttaactctgtgatggcgctggagctgcataatgataagccgttgtcgccgctggtgaatgccggtgcgatcgcgaccgtcagtgcggttaccgcaaaatctgccgatgaacgctggcagcgcatcctgaccatgcagcgccgtctcgggtcggagaatattgctctgtcggacgaactgaatcagtcagagcagaccaccaatttccataaccggggcatatcctggctgctttacgccgctcaaaacctctattgtgacccgatggaggcctgtgatgtgtatacccgccagtgctccacactgctgaccaccaaagagctggccacaatgggcgcgacactggccggacacggcaaaaacccggtgaccggtgagcaggtgctgaacccggcacatactccgtttatcctggcagaaatgaccatggaagggctgtacggccgctccggtgactgggcatacacagtcgggttaccgggcaaaagcggggtcggcggggggatcctcgcagtggtaccgggtgtgatggggatagcggcattttcaccgccgctggatgatgacggaaacagtgtcagaggccagaaaatggtggcttcggttgccgccgcactgggatataacctttaccggtgatcccgctgataacgataacgcccgggcttccgggcgttatcagatataaataaacaccagcggcagcacatgttttatttcaggagcgggttatgaagccagtgtcatcagaaaagccgttaacgttgttacaggttattgcgctggggatcggcgcaatggtaggtgccgggatttttgccctgctggggcagacggcactgattatgcaatctgcaacatggattgcctttgcctgcggcggtctggttgcgttatttgccggttatgcctatgcccggttatccgcctgttatccctcgccgggcggtattattgatttcttccggctgtcattgcccgccgtgctgacgatcgccttatcctttttgtatcttgtcacgctgatcctgacggtggcgatggtggcaagggcgttcggggcttacgccgttcagctttttcatcagggaaatgaatcggccttattaccggaagtgtataccgcgtttattatcatcgcggttggtctgatgaatatcaccggcagccatgctgtcggtaaagtggaagtccttctggtaggcaccaaactggtgattattatcgccctggtggcgacgggcgtatttactgtggatacaacactgctgaatatcagcacgttttccggagatacccttttttccgccgtcgggctgacgtttttcgcctatgccgggttcggcatgatggcaaatgcctcagacaaagtggcagaccccggccgggtgatgccgagggcatttatgatcgccattttattcacgattgtactgtatatcagcctggcgctggtattgctcggtaatctctcgccgtctcaactggtccgttatgccgataccgctgtggctcaggtggcttatcccgtatggggaaaaaccggttttgtgattgtggccgccgccgcgctgctggcgacaacatccgccattaatgccaccctgttttccgccttcaatatcaccgacagaatgtgcagcaccggtattctgccggattcctggggcaaaacggtattccggcagggaacaacagtgaatattctgctcattctgctgacactgctgctggcgctgttcctgaatctcagtgatctggccaatgtcgccagttttacgtttcttctgtgctatctgatggtgctggtggtggcgtggcgtcagagcgcagttatccgggcatcaaaactcattaccgggaccgggattgtccttgtcaccgctgtattggctggttttgtggtgacgttgctgagcggaggatttatttctgtcagtgtgattgccggggcccttattctctgtctgtttgccggttatctgcggaaacggagccggaaagatgaatgaatggctcgataatattcttcttaattatgtgacttttgtatcactgttcagtcccccggcaactatcactgccgccacaattatccttggccggattgaccggaacatattgtggcaaattgcctggaaaattgcggcgggatacacgctggtcatgctggtggttatctggctggggaactggctgctgacggctctcgggctgagtgcggatgccctgactgttaccggcggtattgctttattggcacagggatggccgatgcttatccgcggggtcaaagaggagcacagcgatattccggtcagtgtgacgccgccgaaagatattatgcggctggcaatggtaccgctgcttttcccgctgtcgatgggcggcggcacgatagcggtcggaatttcgctggccggacacagtgattccctgtccgggctgatacagctttctgttgtgatcctgctgatgctgcccactattgcgctgacctttctggcaaccgggccgctgcacgggcgtttatccccgggggtgatggataccctggcgcggatctccggcattattctggttacactggcgattcagttactggtctcgggaatggtcggtcttatcacaacgaatctgaagcatcttacggggtgataaaaaataaagcccggaaaaccgggctttatggggtctcagagagaggaaaaaattatacgtcgatgtttgccgctttcagggcattctcttcgataaaggcacggcgcggttcaacatcatcacccatcagtgtggtgaataactgatccgttgcaatcgcatcttttaccgtgacctgcaacatacggcgggtttccgggttcattgtggtttcccacagctgttccgggttcatttcacccagccctttatagcgctgtacagccagaccacggcgtgattctttcatcagccagtccagtgcctgctcaaagttgctgacgttctgacggcgttcaccacggacaacataagcaccttcttcaatcagaccacggataagctcacccagtttggagatacgggcatattcgctgccgtgaacaaaatcgaaatccagattgtagtcagtatccacaccgtgggtacggatagtcagtaccggctcaaacagctggcgctctttgttttccgcaatacggtagctgtaggtgctgccgtgctcttcatgacgggtcaggcgctctgtcaggctctgtgcccaggcttccacctcggttttgttcagcagcgcggattcttccagtttcggctggtagaccaggctgtttaacagtgccagcggatagagacgctctaaacggcggataattttgtgtgcgccgttgtattcgtgcagcagtttttccagatgttcgccctgaatcggagctgcattttcgtttacatacagtgccgcgccatccagtgcgatagagacctgatactgctccatcgcttcgtcatctttaatatactgttcctgcttgccttttttcactttatacagcggcggctgtgcgatatacacataaccgcgctcaatgatttccggcatctgacggtagaagaaagtcagtaacagggtacggatgtgtgaaccatcgacgtcggcatcggtcatgatgatgatgctgtgatagcgcagtttgtccgggttgtattcgtcgcggccgataccgcagccgagtgcggtgatcagggtggcaacttcctgagaagccagcattttatcaaaacgcgccttctcaacgttcaggattttacctttcagcggcaggatagcctggttcttacggttacgcccctgttttgcagagccgcccgcagagtccccttccactaagtacagttcggagaaggccgggtcgcgttcctgacaatccgccagtttacccggcagaccggctaaatccagcgcgcctttacggcgggtcatttcacgggcacggcgtgcagcttcacgggcgcgtgcggcatcaataattttgccgacaatgattttggtgtcgttcgggttttcatccagatattcagacagcttttcgttcatcagggtttcaaccgccgttttcacttcggaagagaccagcttgtctttagtctgggaggagaatttcggatccggcactttgacggaaatgaccgccaccagtccttcacgggcatcgtccccggtggtgctgactttggattttttattcagcccttctttctcaatatagctgttgagggtacgggtcatggcggcgcggaaaccggcgaggtgagcaccaccgtcgcgctgcggaatgttgttggtgaagcagtatacgttttcctggaaggagtcattccactgcatggagatttccacgccgatatcgtctttctcagtggagaaatagaaaacgttgttatgaatcgaagttttggcgcggcttaaatattccacgaatgctttgataccgccttcgtagtgaaagtgatcttctttgccgtcgcgtttatcgatcagacggatcgatacaccggagttcaggaaggagagttcgcgcaggcgttttgccagaatgtcgtactggaattcagtctcgcctttgaaggtgtccatgctcggccagaaacgcacgcgtgtcccggttttatcggtttcgccgacaacagtcaggcgatcctgcggttcaccgtggcggtaaatctgctcgtgaactttgccgtcacggcggataaccagttccagtttttcagacagggcgttaacaacagagaccccgacgccgtgcaggccgcctgagactttataggagttatcatcgaacttcccgccggcgtgcagaacagtcatgataacttctgcggcggagacgccttcttcttcatggatcccggtcgggataccgcgaccgtcatcctgtacggagactgaattatcattgtgaatggtcacaatgatgtctttacagtaaccggcgagggcttcgtcgatagcgttgtcaacaacctcgaagaccatgtggtgtaaaccggttccgtcatcggtatcaccaatgtacattcccgggcgtttacgcaccgcgtccagcccttttaatactttgatacttgaggagtcataggtattcgacatcaacgtttcccgctcatctaatcctgattattgaacctgtattttacctttttccacgacaaagaggcgactgttttcatccgccatatcactgacctgttcaggggtgatggcactgacaaaaacctgtgcctgtgtggctttcagccggtgagccagtaaaagacggcgcccggcatccagttcggaggcaaaatcatcaagcagatacaggcattgctgcccgctctgacgggtgaaatattcaccctgtgctaaccgcagcgcgcacatcagcagttttaactgaccacgtgaaagtaaatcttccaccggcaccccgtccgctctgatccgtaaatccgctttatgcgggccggaggcggtgtaggtcagtgcgcggtcccgttcaaactggcgctgcagaagctctgaataatcggtctctttatcccatccgcgctggaaagagacactcagcgaaaattcaggtaaaaactgctgacaggtctgctcaatatcctgagcaatcgctgtcacataattctcccgccactgactgacctgctcagcaaccggaatcagctgctgatcccagtggcggatctgaccgtaattcgatacctggcggagggcggcattgcgctgtctcaccagacgttttaaatcactccacagcgcaaaaaattgcggttcattgtggaaacagccccagtcaatataagcccggcggaatttcggcccgccgttgagcagggtaaagccttccggggtgataagctgcatcggcagtaattttgccagctcggcaattttatggccgtcagtgccgtcaatgcggaccttgctgtcaccctggcggtttttactcaggccgacgctggtggcccggtctgtctgttcctgcccgagtttgccgtgcaggataaattcgtcgttatcatggcggataacacgccccgcctgtactgagcggaatgcccggccgtggccgagtgtgtaaatggcttccagaacactggttttaccgctgccgttcgggccgaccagaaagttaaacccggtggccagcggtaaatccgcattttcgatattgcgaaaatcacggataagtaaacgcgagaggatcatcgtgttacaggcgcatcggcatcacaacgtaagcggctgcatcactggcgtcatcttcaatctgcacgctggaggtggcatcggtcagtttcaccgagacatcttcgcatttcagtgtgttaagaacatcaaggacatagctgacgttgaacccgatttccatgtccgttccgtcataggtgacatccacgatctcttcggcttcttcctgctccgggttattggcggtaattctgagctgattgttgctcaggtaaatccgcacgccgcggaatttctcgttcgataaaatcgccgcacgggaaaaagcctgcttcagcatatcacaatttgccgtcagcgttttgtccgggttcttcggcaggacacggcggtagtccgggaagcggccatccaccagtttggaggtgaaaataaacccgccgacatgggcgcggatgttgttgctgccgatttcgagtttcagcagggcatcgccgccgtcgagcaggcgcatcagttcgataacccctttacgcggcacgatcaccgaatggtccggcagttcctgtccgatatccagcgagcagaccgccaggcggtgcccgtctgtggcgacagtacgcagcacagagccgctggtttcaaacagcatgccgtttaagtaatagcggacatcctgatgtgccatggagaactgggtggattcaatcaggcgtttcaatgttgcttgcggcagagagaaagtgacatcactctgccagtcatccagattcgggaaatccgaggccggtaaagtggacagcgagaagcggctgcgcccggagcggaccagaagacggtcaccgtcaagctcaacactgatttgcgcgccgtccggcagaccccgccagatatccaggaacttccgggccggtaccgtggtttcgccgttttcatgcggctggtccagcggaacggcggccatcatttccatctcaaggtctgtccctgtgagatgcagtacgccatcagagactttcagcagtaagttacccagaatcggtagggtcgggcgaccgcccaacggactgctgacctgttgtaagggttttaacaattgctcacgttcaatgataaatttcatagcgctatgatgataatgtccggattaagttagaaaaatcttctttgatgtcgtggctttcctcacgcagctgctcgatcttacggcaggcgtgcagaacggtcgtgtggtcacggccgccaaaagcatccccgatttctggcaaactgtggtttgtcagctcttttgccagtgccatcgccatctggcgcggccgggcgacagagcgcgaacggcgtttggagagcagatcagccactttaattttataatactcagcaacagttttctgaatattatcgatggtgaccagtttctcctgcagtgctaacagatcccgcagtgcttcacgcacaaaatcgatggtaatcgcccgcccggtaaagttggcgttggcaatcacccggttcagtgcaccttccagttcacggacattggagcgcagacgtttcgcaataaagaaagccacttcatccggcaggcggatgttgttttcatcggcttttttcatcaggatggcgacccgcgtttccagttccggcggttcaatggcaacggttaatccccagccgaaccgcgatttcaggcgatcttccaccccgttaatttctttcgggtagcggtcggaggtcaggattatctgctgattaccttcgagtaaggcattgaaggtatgaaaaaattcttcctgagaacgctctttgttagcaaagaactgaatatcatctatcagtaaggcatcgacagaacggtagtaacgtttgaactcttcaatcgcgttgttctgtaaggctttgaccatatcctgcacaaaacgttctgagtgcatatagaccactttggcgttggctttgctttccataatgctgttgccgacggcatgtaataagtgggtcttacccagaccggttccgccgtataagaacagcgggttgtatgcgccacccgggttatccgccacctgacgggcggctgcgcgcgccagctggttcgatttaccttccacaaagctgtcaaaggtgtgtttcgggttaacgttggaacggtaagccacatccggttccgcgctgttatcatgccagctcgggcgcagtgcgggggctttttcccgcgaaggcggctgtttcatcgtccgtgacgggggaatacttctttccggtgtgctgacagcgccggccggcttattaccgacctcaaagcgcagttgcggaatttcgttgccgcagaaatcggacaggagcgcattaatgttattaatgtacttctcccgtacccagtcgagcacaaaccggtttggggcatagagcgccagagtgtcatcactcagctcagcctgaagggggcgtatccacatactgaattctgtggcaggtaattcatcctgcaaacgggcaagacattgctgccaaagcgaaagagacacggtgaactcccctaaacaagaccagtcaaagaaacagaataagatttttcacgcagacacagcacatacagacgaattgtcctctgcatgtttcaacggacacgtcagtgtacaaaagtggggctgtgttatggacgatcattccctgcaccggcgatcaccgcacgggtgaaaatgatcgtgacgacggatcatatcgcaaaagcgggacaagatcctcatccttttacacagttttccgggtttttatccacaggggctgtcagcccgtccggagcgggattcaggccggagtataacgaatccgggcaggagaatacagcgggaaaatcccgtttggggataagttttggtgaattatcctcaggctgaaaaaacgcattcaggatcaggcgcgcgatcgaatattcacggatcgcggatcgatccttgcgctttgccggggagtccgtataatcttgcaccctgtgcgcgttatctgtgtcttgatgcggtgatgtgtgcaggcaggttatgggtaaatgcaattatgtgcagaaatctgtgttatcgcgccatctttgattgacggacaggcccggattttattacaatctcgcatctttccatattgatgttgcgataaggcacagaggtcagccactttccgtgatgaccctttcagcagaaagatgagaatccgccgctgaatttactgtttgccgatgcgtttactgaatcagtaataatttaaagtttaggtagaaaccgctatgaaacgcacttttcaaccgtccgtactgaagcgtaaccgttcccatggtttccgcgctcgtatggccactaaaaatggtcgtcaggttctggctcgccgtcgtgctaaaggccgcgctcgtctgaccgtttctaagtaataaagctaaccatacgtggttaagctcgcttttccgagggagttacgtttgttaactcccgagcatttcaactttgtcttccggcaaccacaacgggcaagtactcctgaaataacacttctgggacgccgtaatgagctggaacatccccgcattggtcttaccgtcgctaaaaaaaacgttaaacgggctcatgagcgcaaccgcatcaaacggttagcgcgtgaatactttcgtctgcaccaacatgagttgcccgatatggatttcgtgcttctggtaagaaaaggggtatcggagttgagtaatcgcgagattacggaagcattaggtaagttatggcgtcgtcacagtcgcttggcgcacgcttcctgatcctgttaatcagaggttaccagctggtgataagtccgctgctgggaccacgttgccgcttcacaccaacatgctcgcaatacggaattgaggcattgcgcaggtttggtatgataaaaggcggttggttaacggtgaaacgcgtattaaaatgccaccctttacacgaaggtggtgatgatcctgtcccacctaaaaatgatgataacagagaacattaacgatggattcgcaacgtaatcttctattcatcgctttgctactcgtatccttctttgcatggcagacgtgggaaagtgataagacacaagcacttaacgcggctactcaggcaacgcagcagacgacaacgccaagtggtgaaagcagcgggcagaacaaatatattacggtcaaaacagatgtgctgtcactgaacatcaatctgcgcggcggtgatattgatgaagctgaccttttggcttacccggcaaccttaaaatccgcagatccgttccgtttactggaaacaacacctgaatttgcctaccaggcaatcagtggtttaaccggtgtgaatggtccggataacccgaataattacaaagatcgcccgctgtataccactgaaagcgatacatttgtgctggcggaaggccaggatgaactgcgtgttcctctgactttcgttctggatggtgtcacgtatgtgaaaacctatactctgaagcgcaaagactatgccatcagtgttgattacaccatcaaaaacgacacctcagctccgctggaaatggcgtttttcggtcagttaaaacaatctgtgaatttaccggaacgtcttaacaacggcagcagcaactttgcgctgcatacctaccgtggtgcggcgtactcgtctgaagacactaactacaaaaaatacagcttcagtgatatcgaagataaaccactgaacatcaacagcaatgttggctgggtagcgatgttacagcagtattttgcgacagcgtgggttcctgagaaaggcaccaccaataacttctatacgctgtacagtgccaaaaccggcgatgcattcatcggctataagagtgatgcaatccgtatcggggcaaacagcgaagcgaaatataacgcaacactgtgggtcggaccggaactgcagaacgaaatggaagccgtggcaccgcatctggacttaaccgttgattacggctggttatggttcatttctcagccgctgttcaagttactgaagtttatccacagcttcatcggtaactggggcttctccatcatcgttatcacctttatcgtccgcggtatcatgtatccgctgacccgtgcgcaatacacctcaatggcgaaaatgcgtatgcttcagccgaagctgaaagcaatgcgtgagcgcatcggtgatgataaacagcgcatgagtcaggaaatgatggcgctgtacaaagaagagaaagtgaacccgctgggtggctgcttaccgctgatcatccagatgcctatcttcctggcactgtattacatgctgatgggctcggtggaactgcgtcacgcgccgtttatcggctggatccatgacttatccgcacaggatccgtactacatcctgccgattctgatgggtgcaacgatgttcgtgatccagaaactgtctccgacagcggtcaccgacccgttacagcagaagattttcacctttatgccggtgatcttcacagtcttcttcctgtggttcccgtcaggtctggtgctgtactatatcgtcagtaacctggtgactatcctccagcagcagattatctatcgcggcctggaaaaacgcggtcttcacagccgcgacaaaaaataagcccgtgaccggcggggaatctctgccggtcttatagtattatttaaaggcggtcatattgaccgcctttattgtttatcacacggtgagaaagagagacatggtcatgaataacgctgaaattcagagcaccgataccattgtggcacaggcaaccccgccgggacgcggcggagtcggtattttgcgtgtgtccggcccgcaggcggcacaggtggctcagattgtactggggaaactcccgaaagcgcgttatgccgattatctgcctttccgtgatgaaaccggcaaagtgctggaccaggggattgcaattttcttccccggcccgaactcctttaccggtgaggatgtgctggaactccagggacacggcggaccggttatcctcgatttattgttaaaacgtattctgcttatcgataatatccgtatcgccaatcccggtgagttttcagagcgtgcattccttaatgacaaactggatctggcacaggcggaagccattgctgacctgattgatgccagttcggaacaggcggcccgttcggcgatgaattcattacagggcgctttctccggggaagtgcatcagatggtggaagcactcactaacctgcggatttatgtcgaagcagcaatcgacttcccggatgaggaaattgattttctctcggatggtgtgattgaagccaaactcgataccgttattgctgacctggaacgggttcgttctcaggcgcgtcagggcagcctgctgcgtgaagggatgaaagtggtgattgccgggcgcccgaatgccggaaaatccagcctgctgaatgctcttgccggacgcgaagctgcgattgtcactgatattgccggaaccacccgtgatgtgctgcgtgaacatattcatatcgacggtatgccgctgcatatcattgatactgccgggctgcgcgaagccggggatgaagtggagcggattggtattgaacgcgcctggcaggaaattgcacaggcagaccgcgtcctgtttatggtggacggtaccacggtggatgaacagaccccggagcaaatctggccggaatttatgtcccgcttaccggccggtatcccggtcaccattatccgcaataaaaccgatatcaccggggaaaccaccggcatcacagagcggaacggcgatacgctgattaaactttctgcccgcgaaggccacggtattgatttgctgcgcgatcacctgaaaaccaccatgggatttgaaggcaacactgaaggcggattcctcgcccgccgccgtcatttacaggcactgaacactgcggcagagcatctgatctccggtcacgagcagttagtggttgcccgctccggcgaattactggcagaagaattgcgtctcgcccagcaggcactgagcgaaatcaccggtgaatttacctccgacgatctgctcgggcgcattttctcgagtttttgtatcgggaagtaagctgacaaaccctaacactgattcggtttaacgacagccacattcactgcctgtgtcttacgccgggcaggtagtgtaatacagaccagacaggtgaaaatcagtgcgactccggcccagccggcggtggtgagttgttcgccgacaataatggcggcgagtgcggcggcgacaaccggttccagcagtgtaattgtggtggcggtactggcgggaatacgtgccagtgcataaccgaaacagacatagcccagaaacatcggtacacaagccatgtaaatgccgactgcggcgttctgccacgaatccaggaatggtgcgccgtaaagtgctaatactggcatcagcagtaatcccccgatcccgaaaataccgcccatagctgcccgtgacggaatgttgcgctgcatcaggcggcgcgcggcccaggaataaagcgcataagtaaaggcggcgagtaatcccagtatgacacctgtcagtgtggcggatgcatccgctgcagcaatctgttccgtgccgccggaaagggaaagaagcgcaatacctgtcaggccgagtactgcaccgctcaaccagcgcagtgtcatgcgggctccgtccatgataatttcaataattgccgataaaaccggtgccgttccgatcgatactacggtgccgatagtcaccccggccagtcgcattgagccgtaaaaggcgagcggatatacggcaacagcaacggcacccaataacagcaaatgccattgctgccggaaagtgccgaggctgcggcggatcggtgtgatggcaatcgcggcctggagcaacccgccgaaacccatggcggcagcaccgatagcaacaggactgacatccggtgcgaaggtggcagaaaccccggtggttccccataagaaggaggccaggataatgacggcaattccggcaaagtggcctttgggtgtctggatcacagcgcctccagcatggtttttgccatggcggcagcctgtaatacccgtgccccgtgctcttccagcccggcgagtacaatcgcaccttccagtaagaacgccaggtgtgcggtcagttgctctgctttcgcggtgtcttccggcagcaactgataaaggttcttgcggataatatcagctacttcagatttgtgagcacacacttcgcgacgttcctcactgccggccggaaactcagcggctgcgttcagcaggccgcatccccggaatccccgttcataggcaaactcagcatggtcgtgataagcatcaaataccgccaggatccgctgtaccggggttgttgcctgttgcagacggacatcatataacgccagccattcttcatgccgcagccggatgtaagtggtcaccaactcagctttggagctaaaattgttatacagactttttttggcgacaccggcctttttggtgatcgtatcaataccggttgccgcaatgccctcgttgtaaaacaagatgcctgcggcttccagtaaacggtctctggcactgagccgggtctgtgttgcgtcggtgtccttcatccggaaaatctcttgtgtttaattaataggtagaccagtatacctattagctctgtgtgcacaagaaataatcactgtcgtgaatacactcagccgttaaaaacccttgttcagctgaaaacgtaatgagaatgtcaccctccgttttgcacctggtggcggcgtaccgacagcagcaaccctgatgacagcatccattgcggcgttatccagtaattcataaccggaagagcgggtaacgaccggtgcaaaaggtttgccgttatcgtcgagagaaaaggaaatggtgctgatcccccgctgcccggcgctgcgggcccggcgggggtaatgtttttgctcctcaattttttgccgcagcaggttaaagtaatcctcctgtgctttccggttatcggctcctgcggtggcagaatttgtcggggatactgcctgtccgccggactgctgctgtgtggttttatcctctccggtatctgcggtggttgctgtggtaaccggttctgatttctccgcctttttgttcaccgcttttactgccggttttgctgatggcggtttggttgttttctccggtgttttccggcgggcggttgccagttctgcctgagacggtgattcctgtggtggtggtaattgttccgcttccggctctgtttcctgatatacaggtgttgcattcatctgaatggcaacggaaaccgctggtgtttgtccccggttatcaatctgatgctgttgcggggtggtcaccggggggctgcccgtgatgagcagcccggcgacggagaaacacacaccgatcgcagcaacagaaaccatctgctgccacgttccggttctttcccgggaaaacaggaaaggcggatgcggtaatgctattgcgccgtacataaatcagaacctcgcagagacattgaattttacggcccggcccggtgcaggcatcatcgaccgggtgagcgggtcgaggtaatattcattggtcaggttggtggccgtcagttcgagggcaacatccggggtgattttatatttggcataagcatctacggtcagtactgaattccatcgcatcgggtagttattaaaattgctgtattggttagggacaatcgtcatcaggcgtttctcctggctgttttccactgcactgtggtagagccagcggctgccgatttctaatgactcctgcaataaacgcccgccgaggttaaaggtcacagagtagtgcggctgaatttgggtgcgcaggaacccgcccggataaccaccgtcaatgcatggcggaatatctttcagcccggtaggatccataaaggcatgggatgtttcatcacagactttattggtgaggttataggtcacccccagatcactgaagatccagccatgatcataacgggcctggatttcaatccctttcaggatctgcttatccatctgtgtaaaacggaaataattatcacgatcaaagacattgaggatatccgtatggaagtagttcagccggatatctgcatggcggtcagcatgaagcagtgatttcccgttaaaaactacaccgtattcccgtgttaccgcacgttccggtttataacggtaaccgatatgcgggacagaggaaccggaaaacccgacagtatcctcaaacaggctcggcatacgtacggtttccgcatagcggccatacagacgcagatcatcagtcagatgcaccgaggcagacagcatcggtgtccaggcgctagcctggcggcggggtttttctttccaggtgtgggtgactgcctgaagttctctgtcaccgtgcgaaatagggaggctgccatactcatagagataggtttcctgcccggtatagggatcaataccccgtaatgcggtatcgatatccggccggtctttctgtttcaggcgtccgtcactggtatccaccggccagaatgcctgctcatgtaccattggccggtctttccggttgttgaggtaatcacgacgccattttgggtatatagactgaaaaatttttccccatgttgcttgtttttcttccggggtcagttcgtgccacataccctgctgccgttttttataaacctgtgattctatttcggtcatattccggaaataattcaggtaataaccggtaacttcatagttttgtttgcagtaggggtctttgcgggcggcgcactcattggagagatcatccacactccagtatacggtttgtctgccgccggcactaagtgacagccaggagaccggctgccagtccaggctgacggattgctgatattcaaagcggcggcctttacgggcgggaacagcgaacataaagagtttatagttttccaggctggtattactgtccagatgctcaaactgcatattggcggccagagtcaccgacagttccggggtaaaagcaaacttattgctgaaatccagcccgtagcgctgattctgtacattcagggcagcggtgttaatcagtgttccatcgattgccgggttgatggtgttgatatccccctgtttatagccgtagtccatattcttcgggtaacgcggccagccgccgccggagttggtattgctggtggtcagggtggtccacaggcggatatctgcatcaatataggtaaaatgtgccggttgggatttcaggtgaagataaccggcctgtgcatgcaggtcagccagcggccactgcggaataatattatcctcagcgcggatccagcccagccgggaaggcataatatcgccgaaatccgagcgggtatcgcgccagctgagttgcagcgcgtggtcatcattcagataccaggtattttttatcagccaggattccgtttttgccgatgtattgggaacttcattacccttgcggtaaatacgggacacaaacggcatatacgggtcgtaagtcatattcgacatttgcaaaataccgatatcactgtcagacatttcatcattatagttttcgctgtggcgtttaccggcaaaatagtttccccggtcgcggtaagcataagccagcagcagatccatattttcctgacgggtacccactgccagacgccaggcgtagtcgcttttattcagtgtgggggcattatcacgattttccggggttaaatgggtgccggggtcgtcaatgataagccaatcaaattgcatattatccacaaggcggtaatcttccccgagccccagattgggtatccgggctttggtggtgttactgctgttttccagcatcagtgcagcaccaaactggtcaccgtttttcaccacgtcattgatagtgagcgttttcatggcaacaccgccgcctaccgacgttttcaggagcgggttaagggacgggcctttttcaatctcaatttcactgatcagcatcgggtcaaggtagttacggttattggcaccgttataaccccggtacaccgtcacggcctgttcggtgccgtcgatggtgaccggtacacggcccggcccctgtattccgcggatattgacatccagcgcgttgccgttgcgggcatcaccgctgaataccccgttggcgcctttgagaatatcggcggcagaggcgcctttatagcgctctatttcttctttggtgaggatcagggtggagacatttttgtcatagattttatctttggcgctgtcagcagcggtctgttcattacggagcgtaatatcgcccaggtgctgatctttttcctctgccgccagtcccggcagcgggataaataacacgggcagaagcagtgtgattgttttatatgggtgaccagataatggtgaatgcgaagacataacgattcccggatgataaaaaataaataatcagaaagggttaaaacagccgttcaaaacgcagcatgatttcagtctgccggtagctataaagccatgggacagaactgcggttgcgggtgtggatcagtgaaagctgaggtgaaatttgcgcgaatgacggcggatagagcgcgagtgttgtactgtactgtcgggtgagatcctccctggcctggcggtgtaacggatgtgtatggtgataacgtttacgggtgtaaacggcatgaacagactgggacacaaaagggtgccacagataggtcaggccggtatgcagggcagccgtctggtaatgtttatagggatcattttttttgtggacggtggtttctgcctgtaaatacagcgtggctgccggatgcggacgccaggttatctgtggtatcaactggtattcagtgccgttatgtgaatgcagataaggctgataacggtgctgtcgaagtgcagccaatccgccgagagaccactccgggctgagttgctgattcagatacgtttgtaagccgtaagctgaggaaaaacggcgcccggcggaaaaatgctgctccagcagcggagtcagttgccataaagtatggtgatcctgatagtgataacccgttttagcagtcagtgttaaggtattggctgcctgattcgcggcatcataccgggtggatacccggtagtgctgcgtcagaaaatgggagccggacagcggcgtcagcctgcgcagatcccagtcgctgcgccattgtaagacggtgtgggggatctgcggaataaggctggcgtaacaggaaccatcggggctgtagtgcaggcagtgtgttttcggcagtggagtctgataatagttatccgtgtaatggctaccggcgctgagcagtaatgaccaactgagtgcccgggtgagttcggtaatggcgcgggtaatctccggatagtggggagaggtcaccggcaggcgctggctcagttcccggaacaaaagcaaggcgttcccgagctgacgatcagcccggtagctgcgggccagttccagttgtgcggtaaagaaatggggtttctgttgcagaatagtgttatataaccggattgcaaccccggggcgctggtttaaataggccagttttgcctggctgaagattatcagtaacgggtcagcctgatgttcctgctgataaacagataagtaatgataaattgctttgaggttatttttctttagtgagagatataaatttcgtgcagtattatcattctctgaatgattatttttttgtatggttgcagataccggtaatgaaaaagcaagtaataataaaaaaagaataaatccgtaaattaactttatctgcgatgacatatttatatccgctaaacaccaggaacagataatctgttcctgatgaaatgtatcaataatgaattaagacttggttccgccgaacgcgatattcttcgctttatcactgctgaactcagcataaccggcaacctgctgtgcattgtcaccaaagaaatgcccgttggtcgtaccgctgacggctgtggtatcggtaccggtggtgctgacagatgcggttccatcaaaggttgaaccactgatatccccgctcaggctgtagctgagctcggttgagcttagagagccgctaaaggtattggcatcaaaatccgtactaaatgtaccgctgatctgttcaccgctgctgtacccgctgagtcctttaatgctgtactgtgccgtcccttcggatggcatggcggcggtaatatctttcccggcgtaatacaccatatgggaatcatcgctgaaatcagtaccggaaacccattcaccgtaataaatatcggcatcggctattttggcaaaattaaaagagcccatactgcggtgtgactgcggagttgaggtgataacagaaacaccgttatcgtttggtgttgcacggttgggtccctgcagtccggcaaagctgactttggttccgttgtgcatgccggaataaccaattcccggttctccgcccggtgacggatgcccctgacgctctgatgcagcggttacgccgacagatatatagttacttaagccttcggcagatgatgatccatagcccgcatcagcctgagcctgtaccgcggagaatgcggcacacagggtaaccagtgtcgccagcggggttttcatattaaatgtattcataaactaaactccttgtaatttaatgaatgaccggatgagtgaaatgcctttttccggtatgattgccggaagcaaataaacgataaaggagaatgaattttctgtaaatgagaattattatcatttgtttgcaatgagaataatttgattagaatgctaattaaataacgaattaaaaaatcaccattttttattttttgtgacagatttatttcaaatataagaatgaaaatatgtgatgcacattcagagtttttctgtgcggtaaaccgggttattaattcataaatatcattaaaagtgatgattattttttcttttattgatggagcgattttaaacgtaataataatgtatttaattaatggttattatcgcatttgatttggtatttatgtttcatactgtctggtgttttaagctgaacggatagtctgacaatgaaacaaacgctgatatttttgctgttaacggtgctggcctgcggatccgcatcggccacatggccgcaaaccgggagaagtgatttttctgagcgttatgaggtgattaccctgacaccggctatgccggtgcccggtgcggttaataatgacccggcaacaaaaggcctgcggctgatcggcctgcggcgtgacggtaacgggcagtacaccgaggttacgcgccagttttcccccggagcgacgaaacacatccgttataaaggacggcagtaccgcatagtcggggatgtttaccgtgcagataatctgtcagataccggacgctgggataaagggcagtccgtggtgacggaagagtattacgagattctggataaagacggaaaacggacaggaaagggattttatttttcgtcgcgtgaccgctgatgtaagtacaaataaggtatcagcaataaaggttgtattaagttttctgcccggaaaaccggtaacataccggaatcaccctgattagcggagaagtacatgtcatcagtccggatcctcagtgttgcacagtgtcatgaatcgctgctggacagcgcggaagcactgattgcggaacaatggccattgtttatgttatccagtccggtttctgaccagtactgggatgcactttatcgtgaggaaaacttgccttttcagcaggttgcggttgtaaccattgccggagaggagcaggtcgtcgggcttctgagtgcgattccgttttattttccggaagatgcaccgctgactgatctgccggatgagggctgggatgcggtgctgacgcagggggcaaccgatacccggaaaccgacatttgtatccgcactgtcagtgaccgttgacccggattttcgcggacgcggtatccctgcacagcttatcaccgcgctgaaagcggccgttgcacaggccgggctgaagggcgtggtggtaccggtgcgtcctacgctcaaggcacagtatccgttacaggatttcgcggaatattgtcagtggcagaccccgcagggtgagccgtttgacccgtggatccgcacacatgtccggctgggcgggcagattatcaaaccggctatgcgttcgatggatattacatcctccgctgataactggtctgaatggaccggcatggcctttccgcacgccggtcagtacattgtgccgggggctttggtaccggttcaggccgatcctgaaacggatcgggtcatttaccatgagcctaacctgtggatctatcatccgctggctgaatagtcaggggatcagccgttcagggtgggtatagatggtggcccgcccttttttacagaagccggccagtgtcaggcggcagcgtttggcggtttcaattgccagcgtggtcggggcggaaaccgcaaacagaatttccgcgccgcactgcgcacttttctgcaccatctcatagctggcgcggctggagaccagcacaacaccatcagtccactgtgcttttgcccgcataccgagcagtttatccagcgccacatgacggccgacatcttcacaaccgcccagtaattcaccctgcggagaaatccagcctgcggcgtgagtgcagccggtcagctttcctatttcctgtacctgcggcagcaggctgagtgcctcatcgaggtggctgagagaaaaggtctgtgtgaaatccagcggcgtgatcgggcggaaaatctcgctgatctgctcggtgccgcagatgccgcagccggtgcgcccggccatattgcggcggcgctctttcagcccggcaaaacggcgggcggataattcaacgtggacttcaaatccgccgtggcaggcatccgtaatatcaatcccgcggatttcatcagcggattcaataatgccttcggaaagggaaaaaccgaccgcaaagtcgtcgaggtttttcgggctggccatcatcaccacatgggagataccgttgtacaccagggcaaccggcgtctcttctgcgacccagtcattttcattatgcccgggtttatctttttgttgcacatttgtgagatgcgcaccgcgaattaggcaattatgtaacgattctatggaataaatgtcatccatcagatgaattcctgcgcttaataatacataataatagtatgggtaaaagtttacaccattccaccaggcaatgaacctgatcgcacgcaccactgtgcggataaaaagaaagttcgctgtggcttattttgcagcggcataagagcaatgtaataaggagatctccatgcaagtcagcagaaggcagttctttaagatctgcgctggcggtatggcgggtacaacggcggcggctctgggctttgccccggcggtcgctattgccggttcacgtcagtataagcttttacgcgcacgtgaaacccgtaatacctgcacgtactgttccgtcggctgcgggctgttaatgtacagtctgggtgacggggcaaaaaacgccaaagaatctatttttcacattgaaggggacccggatcatccggtaaaccgcggcgcactgtgcccgaaaggcgcaggtctgatcgattttatccacagcgaaagtcgtcttaagtatcctgaagtccgtgagccgggcaccaacgagtggaaacgtatctcgtggaatgaggcgtttgatcgtatcgcccgcctgattaaagatgaccgcgatactaactttattgaaaagaacagcgatggcgttaccgtcaaccgctggttaaccaccgggatgttatgcgcatctgctgccagtaacgaaaccggatttgtcacccagaaattctcccgcgccctcggcatgcttgccgtggataaccaggcgcgtgtctgacacggacctacggtagcaagtcttgctccgacatttggtcgcggtgccatgaccaaccactgggttgatattaaaaatgccaaccttgttgttgtgatgggcggaaacgctgcggaagctcaccctgtcgggttccgctgggcgatggaagccaaaattcataacaatgccaaactgatcgttattgacccgcgctttacccgtacagcggctgtggcggatttctacacgcctatccgttccggtactgatattgcgtttctgtcaggtgtcattaagtacctgatggaaaatgaaaaaatcaaccgtgaatatgttgaggcgtacaccaacgccagcctgatcgtccgtgaagattacgattttaaaaacgggctgttcaccggttatgatcctgaaacacgccagtacgataaaaccacctggaattacgaactggatgaaaacggctttgcgaaacgcgataccacactgcagcatccgcgttgtgtgtggaacaagctgaaagagcacgtcagccgttataccccggatgtggtgaccaatatctgcgggacgccgaaagaagatttcctgaaagtctgtgaatatatcggcgaaaccagcgcgaaagataaaaccgcctcattcctgtatgcactgggctggacacagcacactgtcggtgcgcagaacatccgtaccatggccatgatccagctgctgctgggtaacatggggatgctgggcggcggtgtgaacgcgctgcgcggtcactccaatatccagggcttaaccgacctgggtctgctgtctcagagcctgccgggctacctgacgctgccgtctgacaaacagacgtcattggaaagttatctggctgccaacacgccgaaaccaacggtacagggccaggttaactactggggcaactatccgaagttctttgtcagcctgatgaaaaccttctacggtgacaaagcacagaaagagaataactggggctttgactggctgccgaagtgggataaaggctacgacgttctgcgttatttcgacatgatggataaaggggaagtgaatggctatatctgccagggctttaacccgttagcctcattcccgaacaaaaacaaagtggttaaggcgctttcaaaactgaagttcctgatcaccgttgacccgctgaataccgaaacatcgaacttctggcagaaccacggcgagatgaacgatgtggatccggcacagattcagaccacggtgttccgtctgccgtcctgctgtttcgcggaagagaacggctctatcgttaactctgcccgctggttacagtggcactggaaaggcgcggatgccccgggcgaagctatcagcgacggcgaaatcctctccgggattttccaccgtgtccgcaagctgtatgaagcggaaggcggtaaggtgcctgagcaggtgcttaacatgacctggaactactttgatcgcgataatccgacaccggaagaagtcgctcaggagagtaatggtctggcgctggtcgatctgaaagatgctgacggcaatgttattgtgaagaaaggcgagcagctcacctccttcgcacagctgcgtgacgacggtaccacggcaagcggatgctggattttcgccggcagctggacaccgcagggtaaccagatggcacgccgtgacaacgctgacccgaccggactgggtaataccctcggctgggcgtgggcatggccgctgaaccgccgcgtcatttataaccgtgcatctgcggacccggcgggtaaaccgtgggatccgaaacgtcagattctggaatggaacggcagcaagtggatcggtatggatgtgccggactacagctatgccgcgccggattcggatgtcgggccgtttatcatgcagccggaagggatgggccgcctgtttgctatcgataagatggcggaagggccgttccctgagcactacgagccgattgaaaccccgctcggcactaacccgctgcatccggatgtggtctccaacccggcagcccgtgtcttcaaagatgactgggcgcagatgggtaaagcagcggaattcccgtatgttggtacaacttaccgtctgacggagcacttccactactggaccaagcattcacggttaaatgctatcactcagccgcagcagtttatcgaaatcggtgagcgtctcgcgaatgagaaaggcatttcccatggcgatacggtaagagtcagctccaaacgcggttatatcaaggcgaaagcagtggtcaccaaacgcatccgtaccctggatgtgaatggtcaaaaagtggataccatcggtattccgattcactggggctttgagggtgtggcggtgaaaggctttattaccaacacactgacaccgtttgtcggggatgcgaacacccagacgcctgaatttaaagccttcctggttaatgtggaaaaggtgtaaggagataaattatgtcaatgcaatcacaggacattattcgtcgctctgccaccaattccctgacccccgcacctcaggtgcgggattttaaggaagaagtggcgaagcttatcgacgtgaccacctgtatcggctgtaaagcctgtcaggtggcctgttcggagtggaacgacatccgtgacaaaatcggtaccaacgtgggggtgtatgataacccgcaggatctgtccgccaagtcatggactgtcatgcgtttctccgaagtggaagagaatggcaaatttgagtggctgatccgcaaagatggttgtatgcactgtgcggacccgggctgtctgaaagcctgtccggcagagggcgcaatcattcagtatgccaacgggattgtcgacttccagtcagagcactgtatcggctgcggttactgtatcgcgggctgtccgtttaatgtgccgcgtatcaacgaagaagataaccgcgcttataaatgcacactgtgtgttgaccgcgtggatgtgggtcaggaaccggcgtgtgtgaaaacctgtccgaccggggcgattcatttcggctcgaaagaggatatgaaagcgctggccggtgatcgtgtgactgagctgcaaagccgtggttatgccaaagccggtctttatgatccgcagggtgtcggcggtacgcatgtgatgtatgtgctgcaccacgctgataagccgcagttatatcacggcctgccggagaaccccgagatcagtgctgcggtgaaattctggaaaggtgcgtggaaaccactggcagcagtcggttttgcggcaacctttgcggcggcaatcttccattatgtgggtatcggcccgaaccgggtatcaaaacgcgaggaagaagaggccctgaaagatattcaggatgttccggcaaagactgagcaatcagcaggtcaggaggagcagaaataatgcaacaggatgatcgcgaaaaaattatccgccacaaacccattgcgcgtatcaatcactgggctgtggtcatttgttttctgttcacggccatcagcgggctcgggtttttcttcccgtcgcttaactggtttatgaacattctgggtaccccgcagttatcacgtctgctgcatccgtttaccggtgtggtgatgttcttactgtttgtgtttatgtttttccgttattttaaacacaactttatcaaccgtgatgatatcgagtgggcgaagcagatcggcaaaatcatgaagaatgaggaagccggtgatgtcggtcagtataacctcggtcagaaaggggtgtactgggcggccagtatctgcctgttcctgctgctgctgagcggtatcgttatctggcgtccttactttgcggagtatttctccattccggtgatccgtatcgcgctgctggtacactccatttccgctatcgggctgattatcactattattgttcacgcgtatgcggcaatctgggtgaaagggtcagtgcgtgcgatgacggaaggctgggtaacgcgcggctgggcgaagaaacatcacccgcgctggtaccgtcagattgtggcaaaagagcgcgaagaggataaaaaaggtcagtgaccgtttttactattctcgtgtgaccattcagaaggcagggatttccctgccttttcgacattttaaggcagccggttcataatagggttttacttgccggaccggcttatcctctccatatcagaagaagagcaatatcatgagtatccgaattgtatccaaagaagagctgggacaggctcagaaaaatgaaaaagggattggctttatcccggccgtactgtttcctaatctgaagaatctgtatcagcgccgtgccgaacgttttgatgagctggccaaagataacccgtttgcagattacctggaatttgcggctgaaatcacccgcgcccagcagaaagccctgtatgacaatccgcttgaaatggatatggatgccctgatggccgccaatatgccgggcaaagccctgctcgactgccacacttttcagcgcactgaacactggcgcaaactgctgaaaagcattattgccgagctgctgccggtcgcgccggatcatgcccgcccgactctggaaaacctggacaaagcctctgagaatgagctggaagacatggcaacggccttgtttaatcaggaattttccgctgtatcaccggataagtccgtgtttatctgggccgcattatccctgtactgggcgcagatggcgtcgatgatcccgggcaaaggccgcgaagagcacggtgaacaccgtcagttctgcccggtctgtgcggcaatgccggtctccggcgtgatccagatcggcaccacgcaggggctgcgttatctgcactgcggattatgtgaaaccgaatggcatgtggtccgtattaagtgcaccaactgcgaacagacccgtgatctgaattactggtcactggaaagtgagcaggcggcggtgaaagcagaaagctgtggtgattgcggcagttacctgaaaattctgtcacaggaaaaagacgcgaaagtggataccgtggcggatgacctggcaaccctgatcctggatgcccggatggaagaagaaggttttgcccgcagcagtatcaacccgttcctgttcccgaatgaataagtcagtgaagtgagtccgctatgaacgaacgtgcattatacagtcagatacctgccattgacgggttattacatgaaacaccggttgccgcactgacagaacagtacggacagacctgtatcgtcggtgtgctgcgggagatgcaggatgatgcacgtgacgcgatccgtgagcggcagcagctgccggactggcacggttgctgggcggatgaactgtcccgccgtctggacagcgatcgggaagcactgcggccggccattaacctgaccggtaccgtgctgcacaccaatctcggccgggcattacaggcggaagcggctattgaggcggtgaccaatgccatgcgctggccggtcacgctcgaatattcccttgatgatgccgggcgcggtcaccgcgacagcattgtcgcggagcgcctgtgtcagctgaccggcgcggaagcggcctgtatcgtcaataataatgcggcggcggtattactggtgctggcgacgatggccgccgggcgggaagtgattgtttcccgcggtgagctggtggaaatcggcggtgccttccgcgtgccggaagtgatgagccaggcgggctgtcgtctggttgaggtcggcaccacaaaccggacccatctgcatgattataaaaatgccgtcagtgagcagacggcgctgctgatgaaagtccacaccagtaattatcatattgaaggttttacggcagaggtctccgggcaggaactggcggaactcggccgggaatatactatcccgtcagtgattgatctcggcagcggtgctctgattgatatgacacagtggggattgccggaagagccgatgccgcagcgctatctggcgcagggcattgatattgtgactttctccggtgataaactgctcggcgggccgcaggcggggattattctcggcaaaaaagtgtggattgaggcaatacagcgccatccgctcaaacgcgccctgcgggcagataaaatgactctggcggcgctggatgccacgcttcgtctgtaccgccgtccggaaaaactggcgcagacactgccgtcactgcgcctgctcacccggtctgctgacgatatttatgatatggcacaacggcttgtgccgaaaattcaggcatattacggtgatgaatgggtgatccgcgcagagccctgctcctcgcagattggcagcggatccctgccggtggaacgcctgcccggctgggcagtgacgtttaccccgcaaaacggaaaaggcagcgccttagccaccctgacgcagtctcaccgtcagctgaccattccggtgatcgggcgggtgagtgacgggcgtctgtggtgggatctgcgttgccttgaagatgaaaaccgacttttacaggcactgttaccatgatttttgctacagccggccatgttgaccacggaaaaacggctcttattcaggcggtaaccggcgtggataccacccatctgccggaagagaaaaaacgcggaatgaccatcgacctcggctatgcctactggccgcaggatgatgatacggttatcggctttgtggatgtgccgggccatgaaaagtttctcggcaatatgctggcgggtatcggcgggatccgccatatcctgctgattattgcctgcgacgacggagtgatggcacagacccgcgagcatctggcgattctgcgcttagcagggcgtccgcaaatctctgtggtgctgaccaaagccgatcgcgtcccggcggagcgggttgaggaagtccggcaggaaatcacagaactgctgttatctgacggctggccggaaagcccggtctttgtcacctcatcccataccggcgaagggctggatgcactgcgggcccatctgcgtttgcaccatcagcagcaatcttcagaaagccggacagaaaaacgtttccggatggcgattgaccgtgttttcagtgtcaaaggggcggggctggtggtgaccggtaccgcgctggccgggcgtgtcagcaccggtgacacattatgggtgaccggcagtgacaaatctgtccgtgtgcgcggtattcatgcccagaaccgtcagcaggaacaggctcaggccggtgaccgcgtggctatcaacctgagcggggatgtcagcaaagagacggtttcccgcggcgactggctgctgagcgaaaaaccggtgcagtctgcacaccgcattctggcggaaattgaaacagatgaaggtctgaaaagctggcagccggtgcatattcaccacggcgccagccatatcaccgggcgggtttccctcctgagtgacgataacatccgtccgctgctggcggaaatcacccttgataccccgctctggctggcggaggaagacaggctgatcctgcgcgatatcagtgcgcagcgcacactggcgggtgcccgtgtgctgaatttgtcttccccgcgacgcggaaaacgtcgcccggaatttctggcgtggttatcagaacgggcagcggcacaggatgatcgcgatgtcctgatgtgcgaactgccgcgcggggaaatttctctgccggtgtttgcctgggcgcggcagctgacagcggaaaaactggcggaatgtactgccgggctgaatctgctgatcaacgacggttatgtcctttcggcacaacgggttgaaacggcaaaagccattctgctggctactctggcggattatcatcagtcacacagcgaccagatgggcgtcggccgtgacaggctgaaacggatggcattaccggtgctttctgattccatcgtatttccggttattgcacaattactggatgaaaaacagattgtcagaacccgtggctggctccatctgcccggattcggtctggctttcgatccggcacaggacgcgctctggcacagtgcggaaccgctgtttcagcaggagccgtggtgggttcgtgatctggccgttaaactcggcattgatgaaaccgccgcccgtcagtttctgaaaaaagccgcacagctgggtcatattatggcgattgtgcctgaccgctattatcaccggtcacaaatcacggaattcgcgcaggttatccgtgaatataatcagacacatgaagaaggtatcggcgcggcacaattcagggataaatacggcatggggcgtaagctggccgtacagattctggagttttttgacaggaccggttttacccgccgcagaggggacaaacatattttgcgggatgagggactattctgattttcttcaaaaaggatttaagacatgaagatcgatttggaaaattttgtcagtgaattcaataaagagaaattcccgggctattacgtcagaaatgcaaaaatgtatggctggtattcagggattatgaatctccggatctttttcagaagagccttaaacgtgattttgattttaaaacactgatttatgacggccggaataagaaatatgaattcagccggatcccgctggatgaaacagatactgtctcgatagcccgcggaattaccaatgagattatcggtttttataatgatatcgctgccgatttttatgcccgtaaacagacggagctgacctgtgcgattgaatctcatcagtaccgtgatctgctgaataaaatgctgatgtatgaattacggaatatcagcaccggtaattacaatacactggtgtgtgttccgggtatgcagactgagaacgattcatggcttaaattctggtctcagtactggtttctgacaaaatgttatcttgatcaaccggtttacggtgatacccgcgccacgactccggacggtttttatcagtccggtaaaaaactggcggatgcccggatggatatctgggcgggtaaaagacaccgatgcttataacgatattgatcagctgaccgaacagtgtctgatgaaaaaagagatagatctctttctgattgcggcaggcccggcaggtacggtgctatctgcaaggctggcagacaacggtaaaacagcgctggatatcggtaatctggtcagcagttataatacggttttccctgaacagcttcaggcggagtaatgaccggcagataataaaacaggccgcaaatgcggcctgttttgcacggtatgccggaatcaggctttagtggctaaaataacgctggaagcttttatcagtgcgacaatttcattaccttcatgtaattccatttcgtcgcggctttcattggtaataaccgctgtcagcggcagccctttttcggttctcagatgaatcgtgctgttgaccgcaccgttcaccattttgctgattttgccgcggaactggttgcgggcggaaaaacgcaggccgcaatccggatttgccagtaccacccacggcgctttaataatcgcgaccgcttcttttccttcgcggatccctaatacgtcacagctctctttggtgatgacggttgtcagaatttcaccatgctcaagtgttaattccacttcattattaacagcgccggcaacaacgcgggagactttaccggtgagctggttacgtgcggaaattttcattgtgtgacctctttccttttagtgattaactgaaatggttaatcttcctgttgtatcacacgatatacgcagcggcgagaatccgtgagtaaatattcgacccgttccacacttgcatttaaaactgtctgaaagagttccagctcggcgcggcagaatccctgacacatgcgagcggcggagcagataggacagtgattttcaataatcagccagcttccttccggttctttttcccattgcgccatatagccttcctctgtgcggatggcaacgaggcggataatgcgttcttccagagtttctgcgccctgaagtttatcaaaatagtcgcggcgggcttcattctcacgggcggtaataattttgccgatagcatcctcgccgagttcgcggcggatggtggtcaggattttgaccgtcagctcagcgtgacaatccggaaagcgtttattgcccagtgcggtcaggtgccagcgctgcaccggacggccgacaccccggcattcggaatgtgcctcaaccatgccgtcccgggccagtttggtaaactgctgacgggcagcttccccggtggtacccaggtgttccccggcctcggatgcctgcatcgggccatgctttttcaggagaataagcaatttttctccgacagattgtgcggaactgaggttgctttccaggttagttcttgacatattctcgtgcccggtatttatttatccaagttaattcttgtttaatttatcgtattcagcaaagtatcacaagactaaaggatggttctatgttgcccgatgacagccgctggcgtgaccttttctcagggaaaaacgctgcgatttcaatcgctctctcgttcggtgttgttattcacgccgttaatatcttaatggcgaccaccattttgccatccgttgttgctgatatcggcggcctgaatctgtatgcctggaataccacactgtttgtggcggcatccattatcggttctgtactctccgcccggctgcttgccgtatacggtgcccgtatcgcctaccttatatcggtggtggcctttttcgccggcagcctggcctgtgcactggctccccggatggagattatgctgctggggcgcaccattcagggcttcggcggcggtgttatgttcgcactgtcttatgccatgatcaatttagtttatgttccggcgctgtggccgagagccatggcactgatttccgggatgtggggtgttgccacattggtcggtccggcagtcgggggtatttttgcccagttaaacgcctggcgttttgcttttggtgtgatgttgccgctgatggttatctatgggctctttttgcttacgattatgccgaaaaagcagaaagatgacggcacccggccgcgtcttcccctgatccagctgacattgctgactgccgctgtactggtggtctctgctgggagtctcagtccggatgtgttcctgaatgtgggcggcgtggtggtctcgctgttgttactgattgtgcttgcattgattgagcagcgcagccgcatccggttactgccggaaaacaccttccggcgcggcagtcatcatgccgcgctgtacatcactatctctctgctggctatcgggatgacctgtgaagtgtttgtgccgtacttcctgcagcgcctgcacggtcagtcgccgctggcatccggttatatgagtgcgctgatggcgctgggctggactgtcagtgagatcatcagtgccggatggaaaggggcgaaaatgcgtgccagtattctgctcgggccggtttttgtgctggcggggctggttctgctggcactgacgctctctgtaccgtctgccggcacatggggcattatgtcgccgatcctgctggggttatcgctggtcgggttcgggatcgggttcggctggccgcatctgctgacccggattttacaggttgccgcgcctgcggataaagagatcgctgccgcttccatcaccacagtgcagctttttgccacagctctgggtgcggcgctggcgggaatgattgttaacgtcaatggtttcaatgacggtacattgacgggcgtgatgtcttcagcctactggctgatgatgttgctggccattgccccgctgattgcgattttcaccgcccgccgctgcgcggccatttcttacggctgattatcccgtttctgataatagtgtatgccggaatgaggactgtatcccgttccggcgtttttttacactgaccggatgttttctgtcagggtaatgtccgctatgtttcagtatcatctcgaatttgaaaaaccaatcattgagctggaagaaaaaatcgccgcattgcagtcatttaaagagcgcagcagcgatttggggtttgatccggatgatgaaattgcctgcctgcggaaaaaatgcgaaaaactgactcaatcgatttatgcggatctcggtgcatgggagattgtccggctgaatgaagaaccggctcccatcgaactgagagccgtttatgccagccgccgtgaggtgttaccggttgtcgacaaattcctgcattttcttgaaagttcgctgcgggatcaggataaaaatcaatagctgcggaataccgtctgctttccgtccgcatcataggcgaccacatcatacggctctttcatatccttgtattccatacccaggctgccgaccggcatccccggaaccgaaattcctttggcactttccggcagcgtatcaatggcatccaggctgtccgccgggacgtggccaatcacatatttgccgttcagcgtggcgaggtgacagctcatcaggttcgcggtggcgccggaatcaagcatcattttctccagctgtgcctgcggaataatattggtttccacatcgtaaccggctttttccaccccttccgcccactggccgcagcagccgcaggtcggggatttatacacggtgacggttcctttcgctgccatggcaccggcagaaagtgtggttaataataaagataacgcccagacggattttttcatcggtattccctgtaatgagtcggataataatgatgagattaatggtttaccttaggggaaggtcaatacaggggaacgtatagttatgcggagaagtgtaaaggtttaaacggaggtcataatggtaacgcacctgacattacagataacagcaacagaaacccggattttttctgcggaggctgatgtgcggcttccgctcggtgacagtgtgattgacgggtttgtttttcagcactcgccggtgacagcttatgaagcggaagtggcaattgagcatattgaaaaccggattatcccggcgcgggcggcattaccggcgggagacctgattttgcattgccctgatccgcggctaaactatttactgaccggtgatgacgcgggcttcttatccactgaggaaatagaacgcgcatttaatgagatcgtgaatgttatcagcggcagcccggtatcatcaacatcactcccgtcagacaaacaattcacggcatttttactgattatccgtgagatcacccatcactggggactggtcgggctggtaccgggaactgccggaaaaaatgatgtgatttaacatgtatacagaatgactcttatcaaaataaattataaaatttgtattattatttagtctccggggctgccgctccggcgattgtatgatgacagagcagaacagatatgagcattacactgataaataagattaaatccgtttcttcccggttttcggccgggtatttcggcatggtcctggggctgatcggcaccgggatggcatggcgttacgcagcggctgagcaggggtatccggcaatcatcggtgaggtgattattggtgccggttgtgcggtctggctggtgctgatctctctgtttattatccgcagtttctgtttcccgggaaaaatgaccgacgagttccgtcatccggtcgccagcgggttctccagcctgttaccggcaactactgttctggtggcgatggggctgacaccatacttcccgctgttttccaccggattattttccctcggcgcagtagcacaactgtcttacgccgcgtggctggtcggctcccagtggaaaggggaatacccgaaagcggcgaccaccccggtactctatcttccgactgtcgccaataattttatctgcgccatggcgtgcggcgcactcggttttaccgacctcggtattcttttcttcggtgcaggcgttttctcctggctgagcctggaaccggcgattctgaaacggatccgcagtgacgggctgatggatgaaaaatcgcgtctctctttcggtattcagctggctccggcactggtggcatgcagcgcctatctggcggtaaaccagaatcatattgatttctttgccaaaatgctgctcggctacgggttactgcaactggtgtttatgatccggctcatcccctggtttacacaacaggcatttaccctgtcattctggagcttttcattcggagtgtcggcactggcaaaatcctctctgaatatcagtatgtcttcagataatgaatttattcacctgctggcattcaccctgtttattttttccaacgcctttattctgttgctggtggtgaattcgctgcgtctgctggtcagaaagcaaatcacccgcgcccgtatccgcgaagagaattaatgttcagccgccggttcccggcggttatcaatttgattatttattaatcattattctcataatgatatctgcgctgaaaaaccccgctgtcgtgagatgttcagtacgaatagtgaacaatttcacaaagtgatcaaaaattccgttattaatcacattttataacccttctccccgctaatccgccctcctggtgtggttattgctttatctgttgatacagattgcatgacagccgtctgttctccacaagagtcctaaataaaacagatagttattaacagagtcagatagtcaaattcacgtacaggagagaagagatgtctgatcaacaaaacacagcatctgatcttatttaccagctcgaagataaacccccgtttttacaggcgattattggtgccgtgacccatctgctggccattttcgttccgatggtcacaccggcgctgattgtcggcacggccttacagctatcgcctgagaccaatgcgtatcttgtttccatggctatgatcgcctccggtgtcggcacatggttgcaggtaaaccgctacggcatggttggttcggggttattatcgattcagtccgttaacttttcatttgtgacagtgatgattgccatcggaaccagcatgcgggctgatggtgttgatgaagagctgttactgtccactatcttcggtatctcgtttgccggcgcattcttagttgtgggatcgtcttttatcctgccctatctgcgtcgtgtcatcaccccgacagtcagcggtattgtggttctgatgatcgggctgagcctgataaaagtcgggattattgatttcggcggcggcttctccgccaagtcctccggcaccttcggtgattatcagaatatcggtgtcgggttactggttctgctggttgttatcgggtttaactgctgtaaaagcccgctgctgcgcatgggcgggatcgcgatcgggctgattgtcggttatatctgcgccctgttcctggggatggtggatttcagtcagatgagcaaagccgcgtttatcacgatcccagtaccgtttaaatatggtttctcgtttaacttcgctcacttcctggtggtcgctattatttatctgctcagtgtgctggaggcggtcggtgacctgacggcaaccgcgctggtgtccgggcagaaaattcagggacaggaattccagtcccgtctgaaaggcggggtaatggcggatggtctggtgtctgtggcggcttccgcgatgagctctctgccgctgaccacctttgcccagaacaacggggttattcagatgaccggggtggcttcccgccatgtcgggaaaatcattgcggttatcctggtgatcctggggctgtttccggggatcggctggttctttacgacgattccggcaccggtgctgggtggtgcgatgacactgatgttctccatgattgccattgccgggatccgtattattctgtccaacggtctgcgccgccgcgaaaccctgattgtggcgacctcactggggctggggttgggtgtctcttatgacccggcggttttccacgtcctgccgacatccctttacgcgctggcagaaaacccgatctgtatgggcggtgtgaccgctattattctgaatttaattattccgatcagtaaggaaaccgaaccggatgatattgaagaatccgtgagggaagaggaagtttaatcagcacagcctgacagcccgcttatctcagcgggctgtcagtatacggacttaccggtgactgagtgccagcttcacggcaaaaacataaaaagtccgccggtcaggcgatccatccaccggataaagcgccgtgatttcagcaggcgtgaggcgtaaccggtcatcataatcagagtcaatgaccagagcgtaccgataaccacatgaatagtgacgagcagaaatgtccgggctatcagcggctgtccggcaggaataaactgcggcaggaaagagacataaaatatccccttgtgttgtactgaatgattgacgggggtgcagaattaactgaatacccagccagagcagataaagtgccccgcaccatttaacgatatcgtaagccgtggcagacgcggcgagcagtgcaccgagacccggcgccacgaaaagcccccggaaaaagataaaaaagtggtttaacgatattttcccaataagtatcaactataacaataagagaaacggcaaagaaagaatacgctaccatgattttccacacttttttgaagacagtaactgatttaccaaatttcctgtttttctgaacatcagtgagttctttatacaagttttctttttctttatctgacattttttcactgcggattttctgcagcaggcgtgtttcagtttttgtatgaaacaatggcatccattaattcaatatattgcggagagtgcttattactgttcattttgtcctcatgagtactattcagtattgttctgacaataaaaaaagccggcggatacagagcatcagccggcttatggatgtgtattgagttactgtgaagtgttactcaatattctgaatctgctcacgcatctgctcaatcagcactttcagttcaatcgcagagctggtgatatcggcattgatggactttgaggcgagggtgttcgattcgcggttgaattcctgcatcataaagtccagacggcggccgacggcctcttttttcttcaggatattatgggtttctttcacatgggcatcgaggcgatctaactcttccgccacgtcaatgcgctgtgccagcaggatcagttcctgctccagacggttcggatcgacctgaatctgtgcgtcgtccagtttgctctgcagacgctcacgttgccataacaggatatccggcatctgcgcacggactttgcggacttcttcggttacaccgtcgaggcgctgttcgattaaggtcttcagtgccgcaccttcacgttcacgggcatcgataaaggcggtgatggtgtcatcgagagcggccagcaattcttcactgatggtgtccagatcctgttcctgtgcggacattacgcccggccagcgcagaatttccagcggattgatttccccttcgtgactgtagtttttaacccagtttgcggcagcaaccagctgtttcgccaggtcttcattcatattcagcccgctttgcgcgttactgctcaggtcaaagcggaggttacactcaactttaccacgggtcagacgctgacgcagacgctcgcggatcaccggctccaggctgcggagctgttccggcaggcggatgtaggtttcaaggtagcgctggttaacagagcggagttcccatgcggcagtgccccacgggcgtttgacttcctgacgggcaaacgcggtcatactacggatcatgatatctgtcctgtgatggatttattgctctgattatagcgctgttatggtgttaaggcataggcattcaccggtttaagccgtataatgcgcccccaacagttaactgaaccggagaatcactatgagtcagtcatcacgtcccgctggccggggaacagaccaggtgcgtcctattactatcacccgtcattataccaaacatgccgaaggctctgtgctggtcgagttcggtgacactaaagtgttatgtaatgcctccgttgaagaaggtgtaccgcgtttcctgaaaggtcagggacagggctggatcacagccgaatacggcatgctgccgcgcgcaaccaattcccgtaatgcccgcgaggccgcccgtggcaaacagaccggccgcacaatggaaatccagcgcctgatcgcacgttcactgcgtgctgcggttgatctgaccaaactgggcgagttcaccatcaccctcgactgtgatgttatccaggctgacggcggtacccgtaccgctgcgatcagtggcgcctgtgtggcactggctgatgccctgaatcagatggtcgcgaaaggtcagctgaaagccagcccgctgaaatccatggttgccgccgtttctgtcggtatcgtggacggcgagccgcgttgtgatctggaatatgtcgaggattctgcggcagaaaccgatatgaatgtggtcatgattgatgacggacggatgattgaagtccagggtacggcagaaggtgcgccgttcagtcatgatgagttgttgtcgttactggccctcgcaagaggcgggctggaaaccattttctccgctcagaaggcggcattagaaaattaatcagaaggcgacgtgatagtcgccttttttatgcctgtgattcaggcacgttatccgtcaatcagaatcaggagatcccgatgaaagcttatcagcgcgaatttattgaacttgcgatgaaaaaacaggtactgaaatttggtgaatttacgctgaaatccggccggaaaagcccgtatttcttcaatgccgggttattcaatacagggcgggatttggcactgctcggacgcttttatgcggcagcattatgcgacagcggcgtacagtatgatgtcctgttcgggcctgcctacaagggtattccgattgcaacgacgacagccgtcgcactggccgagcatcatgatcttgatatgccgtactgttttaaccgtaaggaagccaaagatcacggggaaggcggaacattggtcggcagcccgctgagcgggcggattgtggtggtggatgatgtgatcaccgccggaacggcgatccgtgagtcgatggaaatcatcagacaaaacaatgcttcgcttaccggtgtgatgctgagtcttgatcgtcaggaaaaaggcaaaggcgagttatccgccgtccaggaagtggagcgcgattacggttgtcaggtattttccattatcacactgaatgatttaatcagctatctggcggaagatccgcagatggacagccatttacaggctgtacgggcttaccgtgagcagtacgggattgagatctgagccggacagcaggcaaaaaaaagccctcgcccaataaaacgggcggggtgagtagtttaactaaaaacggtattactgaagttgtgcaaggatcagcggccagcgggcttcaaattcctgtgttggccggtacttaaattctgagcgtacaaaacgggacagcatgccttcgcaaaaggcgagcaactgagatgctaacaggctttcgtcataagtaaaaccgctgccgtcacggatccgcttttcttttaagacctgacgcaactgagcttcgattcgttcatacaactgattaattctgctctgtaatttatcctgctcaaacatcagtgcgtgaccggtcatgatacgggtcaggccggggttcttttccgagaatcccagaatcagcatcagaatcagttttatccgcgagatagtctctttttcatcctgaaggatgaggtttatccgcgaaatcagtgagtcctcaataaatacgatcaggctgtcgaacatttttgttttgctggaaaaatgacgatagagcgctgcttctgaaacacccacactggcggcaagtttggcggttgttatacgctgactgccgtcactggactcaagcatcagcgcaagcgcctgcaggatctcctcgcgcctgttcttcttttttgtactttctgccatgtcagataaaacccctgcgttaacgcaaaaacaaatctgccgactgacagccgtacaccagtactgctgtcagaaaagcgacggaaataacggcgttattagtattattgacggcctgaatggccaaatccgccggctccgcgctcgctttcggtaaattcttcaacaatattgaattcagcctgaacaacaggaacgataatcatctgtgcgatacgttcgcccggttcaatcgtgaaggtggtgtcgccacggttccagacggataccatcagttgtccctgataatcagagtcgattaagcccaccaggttgccgagaaccacgccatgtttgtggccgaggccggaacgcggcagtaccattgccgccagggacgggtctgcaatatggacggcaaggccggtcggcagtaacagtgtctggcccggcttcagttcagtggcttcatccaggcaggcacgtaagtccagacccgcagaacccggcgtggcgtaggccggtaacggaaattccccgccgatgcgcggatcaagaatcttaatgtcgatttttttggtcatagtgtttcagtatttcgtccagtaaatggtggctgagctcggatttgctcatgttcggtaagctgatatcgccggtatgccagtacagatgcagggcattgttatcactgttaaagccttggttttcaacagaaacgtcattggcgcaaatcatatcgagctgctttttcaccaacttgccgcgcgcgtattcttccacattttgggtttcagctgcaaatccaatcacaaatggccggtttttttccagtgcaccgacaccggcgatcacatccggatttttcaccatcgtgaaggtgatttcgtcgccctgttttttaattttctcaggcgcaaccgctttggcgcggtaatccgcgacggcagcacagccgataaaaatatcctgctgcggggctgttttctgtgcggcatcattcatttcacaggcactgctgacatcaatacgtttaacacccgctggtgtcggtagtgtgacaggcccggcaatcagtgtgacatccgcgccgcgtgctgcggcagccgctgcaatggcaaaacccattttgccggagctgtgattgctgataaaacgcaccgggtcgagtgcttcgcgcgtcggcccggcggtaatggccagacggatgccggacatatcctgttttttacggaagtgctgttctgcccgtgagactatctctgacggatccagcatgcgtcccggaccaacatcaccgcaggcctggctgccgctgtccggtccccagaccgcaaaaccgagctgttccaggtgcgcgagattttcctgagtggtctgtgcgcggtacatctgctggttcatggccggtgaaacggcaatagtggcatcagatgccaggcagatagtggtgaccaggtcatttgccatgccggcgctcaggcgggcaatcaggtcagccgtggcgggcgcgagaataatgagatccgcccatttccccagctcaatatgacccattgccgcttctgcagccgggtcaagaacgctttcggccaccgggaagccggaaacggcctggagtgtcagcggggtgataaatgcggttgccgcaggtgtcatggcgacacggacaaccgcaccccggtcacgcagacggcggacaatctcaggggctttataggctgcgataccaccactgatacccagaactatctgttttcctgtcagttcggacattgtgttttatccagttatttttcggagatacgcgattttaccacaacaccgccgtataggtagggtgctgtgtatttatccagctaaataatgttttttcttcggcgcgtctcgcaaaaatggcgtgttttatgcgaaaaaaccgccggtactgacatactttttccggtaaagcagagaaaacggcgggggaaaaatggataacataaccggaaatacggcactgatgccgagagaaaaactgattgcttacggggcatctgttctgagtgattcagaactgctggctatttttttgcgtaccggtacccgtgagcggccggtgcggcagtttgcggagtatctgctggacgtcttcgggtcactgcaccggttgctgacagcagggtatgaggagtttaagcctctgcccgggataggggacagtaagttttgccagatgcaggcgattgtcgagttgtccaggcgctatttcagcagtcagtttcaggaaacgcaatttctcagcagtgcctgtactgtaaaggcgtatcttaaccagcggatggccgggcaggagcgggaagtctttgcagtactttttctcaataatcagaaccaacttatacgttacgaggagatgttttcagggacggtaaactgtgtggaagtacatcccagagagattttgcgcctggcgctcaaagtgaatgcagtttctgtgattctggcgcataatcacccctccggtaacgaaaaccccagccgggctgaccgtctgctgacaaaaaaaattgttcaggcatgtgagttggtggggattaacgtgttggatcacctgattatcgggaaattcaatatgttttcgtttgcagaacacgagctgatctgagcagtttttttcgcagaaacacacgatctttactgttcgggtcttgagcgtttgcgccggaaagcgtatactacgccacctttgaggatcttgggtttggcgagaagagcctatctcagcatatttttgctggttgacagagcaatttcccggcgagtcaaaagtaagctgagatgggctcctaagcctgacgaggcagcctcacccaatacaaagctcgagctgattagatttttggagaatagacatgtcccgagtctgccaagttactggcaagcgtccgatgagcggtaacaaccgttctcacgcattaaatgcgaccaaacgtcgttttctgccgaacctgcactctcaccgtttctgggttgagtctgaaaaacgtttcgtgactctgcgtgtatctgctaaaggtatgcgtatcattgataaaaagggtatcgaagctgttttagctgatttacgtacccgcggtgagaagtactaaggagctgaaaaatggctaaaggtattcgcgaaaagatcaaactggtttcttctgaaggtacaggtcacttctataccactacgaagaacaaacgtactatgcctgaaaaactggaaatgaaaaaattcgatccggttgttcgtaagcatgtaatgtacaaagaagcaaaaattaagtaatttctgcttcctgattgaaaaaacccggcttcggccgggttttttattgcctgtttacagggaaaggcagactggcagagggtaatattgtcatctgtcttcactctctgagttggttgatataatatattactcttttataaattattggtgtttttatataaaacgatatcttttcaaacgttaattgaagataaaatggcagataaatcggatacttatcttaaatactgattgtaagagtattaaaatattcagattgttgtatcatttacgggtactattgttttatcagaacatacaactataacggctgatttatttattatttttatatagtttttatatgattactgagttggcgtgccagtgacagccagaatctgaatcagtttacttcgcagataaaaacgaatgttggaatatgatatgagtaacccggttatttcggtcatgattgcagtacataatgcggagtcatcaatcctggccgcgttagagagcctggataatgccctgaatgagaatagttctccggagcaggttgaagcgatcattattaatgatggctccaccgataaatcgctggatcttatcaaccattatcagccacgaaactttattaaagtcgttgaaacagttaacttttccaatgtcgggaaagtccgccattatgcatattcattatcccgcggcaaatatatcacggcgttagacagtgacgatatgctgaaaaacggcgcactgagccggattatggatattatgcgggagcatccgttcgatctgctgataacccgtctcgatgaacatcatgatcgtaatccggtattagaaattgaggataaacctgtagtatccatcactcaggacaggttaaaagaactctatctggaacataagacggtaaaaggtcatttactcggccggtttatccgcagggatatcctgacagatgatatgttccctgaaatttattgctatgaagatgtggttattactgcaaatgttatttgcgctgctcagaatatcctgatcacagatactcagatttattgctactataaacatcgcggcagcttatccacagagaaaagtatgaataaaaccgttcttttcctgcaaattgttttatcaatggaaagcttctttgtaaaaaataaaaatgaaaaagtgatgtttgaaggactgttcgttaaagtatgttctgattatttatcaagaaataataaacgtaagcttcctcattttgttatggatcggtttaatgatatcaaagtattccgcttcctgttcagctctaaagtaagattaagcagaaaaattatgtttttaaaaataaaatcagcaggagttttttaaatgttcacaagcagaacattaccaattctcattggtatgctgatgactttctcaatggttattgcttctttcgtggataccttgtcacgggattcttattttatactgagttatttatccgttatcgtgacattctggctggtttttttcaaaagaatgtcacttttccgtgaccgcgctgtgttgcttgttgcagtatcattcctgttgtttggtatttcccgggttgcctggtcatttctgatgaatgatgacgggttgagtatttataaaaactactcacccacagcatcgagaattatactcggagcgtttattttttgtgtttgtattttattaaaaaatgagctgaagtgtttttttagtaataaatatatttcagctattattaaggtattaccgctctatattttattgtatgcgctttatgatatctttgttttgcataaagacagagttgaactggatacaaacagggcaacagtaactgcctactttatcagtgcaatattttttgtcagccttcatttttgtacacaggtaaaaaataaactgaatgtttcattgttttttactaacctgattatttcaaatgcgattattattctgacgcaaacccgtgctgcaatagctatttatcttctgctttctgttttctataccgccattgttttccggaagagcctgaatgtaaaaaaagccagtatggttgtggtatttctgctgatttttgccggcatatcatatgaatttttatataaatcccgtattaatgctgctattttggaaacccagaattatgatgtaacaaaaccggggggatcgctgggtaatcgttatactatgtggtatgcgggactgtctgcgtttaagcatgccccgatgggggagtcttttcaggcccgcaatgattttatttcagaaaaaatagcggctggtaacatcagtgattcaatagatgaatttctgacggtacatctgcacagcgaattaattgaggtgctgtcattgcagggggttatcggtggtgtgctgctggtgctgatttatctctctctgttgtatgccggtattcgtaataagaacgtattactgataatgattaccttgtgcctggccggttatggtctgacagatgtattgttcttcagtcgtgagagtattactgtttatctcctgtgtattgcagtggccctggtgaccggcggtaaagaagataccgcagaacagccgctgccgattgatcgctgaggaggtatctgtgcctgaattgcccgaagtcgaaaccagccggcgcggcattgagccgcatctggtcggtaatacagtgcgttatgttgaagtccgtaaccggcggctgcgctggccggtgtcagaacagattgagcgcctgagtgaccggccggtgctcagcgtacagcgccgcgcaaaatatctgctgattgagttgccggaagggtggattatcatccatctgggaatgtccggcagtttgcgtattcttttggaagaaacgccggaagagaaacacgaccatgtggatatggtgctcggtgacggtaaaattctgcgctataccgacccgcgccgttttggtgcctggttgtgggcagatgatctggcaacctgtccggtactggcgaatttggggccggagccgctgagtgatgattttgatgccgcgtatctgttcgccaaatcccgcaaacgaaacacaccagtcaaaagctggctgatggataataaaattgtggtgggggtggggaatatttatgccaatgaatccctctttttatcccgcattcatccgctgcgtcctgccaaagatctgactgaagatgaggttgcccgcctggttgccaccataaagcaggtactgacggaatccatcaaacagggcggcaccacgctgaaagattttttacagtcggacggaaaacccggttattttgcccaggaactgtttgtgtacggaaaacagggagagtgctgtgcgaactgcggacagaagattgaagtggtgaaagtcggtcagcggagcacgtttttctgccccgcctgtcagcactgattatactttacctagtttttgcatcatcgcctgtgcgacggactccggcagaaatgcagagacatcaccgtcgtgcagggccacgtctttaatcagggatgaagaaacaaaagagagattctgcgacggcaggaggaaaacactctcgagatcctgcgcaaaatggcggttcatattcgccagctgccattcatattcaaagtcagcaacagaccggacaccccggatcagcacattggcattttgctttttggcaaaattcgccatcagctcagaaaaccccagaacttccacattcgggatgtgagaacatacatcttttgccagcgcaacccgctcatcgagggtaaacatcggatttttacggctgctgttggcgatcgcgagcaggatgtgatcaaacatttttgaggcgcgctcaagaatatcgatatgtccgcaggtaatcgggtcaaaagtgccgggatagattgcgcgtgttttcatgatgctgactcatcgttgttactgacggaccacaaagtggcgtatttattaaaggtatattgtgcgttcacaaatgcaaggataagcccctgtttaccatccaggaatccggctctcagcagccaggttttacagaacgcaccggcggtgtgagtcagaacagagaggaaagagcagcgtttaccggccagatgacgggcttttgcccagtcagcagcatagcgcagctgcttttgctgaaactccggtaaatcgcggcaggtcaggtgtaagacatcccctttcagtgtgatgatattggcaccctgtgtctccagagattcatgaactgcattgctgttgtactgatattgctcacggggatataaccgcaggacatgatccggataccagccgctgtgtttcataaaacgcccgagaaacagattgcggcgggcaaaacgatacactgtatttttctgcggtgcggtaagtacctgttcaacggattgtttcagctccggcgtaacccgctcgtcggtatcgagcatcaggatataatccccggtggcatactgctgggcaatctgccgctgacggccgaagcccggccactcccggttttcatatacctgagccccggcattacgggcgatggtcagtgtgtcgtcctgactgccggaatcgagcacaatgatttcatccgccagtccctgaacagagttcaggcaatcaccgataacatcggcattgtttttactgatcatcacaacggagagacgttttttatctgtcatcagtggctccgaggtggcagatacggcccgagcaactgcatcagacggtgcagtgcgccctgattttcgtgaagtacctcagcggcatgccgcccgcagtacagccggtaatcctcatcattgagcagattactgacggcgtcactcagactctgttcatcggtgacagtcagcagggcatcggcctgctgtaatttgccgcagatatttttgaagttgaaggtgtgcggtcccatcagtaccggcagggcgtgcgcggcagcttccagcgggttatgtccgccgcgttcaaccaggctgccgccgacaaacgcgatatctgccagtccatacagcagcatcagttcacccatagtgtctccgaccaccacctgtgtttccggtgacggaatggtgttgctgctgcgcatgacataggtcagaccggctttttcggtcagttcccgtgctttggcaaaccgctccggatggcgcgggaccaggatcagcagcaggttcggaaagtggttcagcagagctttatgagcattgaggataatttcctcttcgccttcatgagtgctggttgcgatccagaccggacggcgggcagcccactgacggcgcagtgtgacggctttggcggccagttccggtgtgacagaaatatcgaacttcaggctgccggtcacatgcagttgctggcggcgcaggccgagctcaataaagcgttccccgtcttcctgattctgcgcggccaccagggtgatccggttcaggatggtttttacgaaactgcctgctttcttataaccggcggccgagcgcgctgacaggcgggcattggcgatcaccagcggaattttccggcggtgcagctcggttatcatgtttggccacagttcggtttccatcacgatcaccagtttcggctgaacagtattgaaaaaccgtttcattgaccccggcaagtcgtaaggcagatagacgtgataaacatcatcacctaatgctgataaaacccgctctgagccggtcggtgtcatagtggtgacagtgataggtaacgtcggataatggtggcgcaatgctcggaccagcggcactgcggcgagtgtttcgccgacagaaaccgagtgcaggatgataccgccggtgccggtttttcctttacagaaaccataacgttcgccccagcgtctgcggtaggccggggagcggcggctgcgccataacagacgtaaccagataagaggttggatcaggtaaagcagaacctggtatacacgcagtaacattttatcagtttcgcagataagattgcggcaatagtagcataaaactaacacgaatagcgcattaaaaagcataaacccggcgtcgctgacggcgggatccccgctgcccggcacaacacactgcgctatctgttaatactgccgggaacgatttgtggtaatctgtgcctcagagattgatacaccttattccctgatttctgtctgacccaaatggaactcttatgcaaacagcatcagcgccggtacagcgtattttagtaataaaactccgtcatcacggcgatatgctgctgataacgccggtgattaatactctgaaagcgaattacccggatgctgaggttgatgtcctgctgtatcaggaaacagcaccgatgctcagccgccatcccggcatcagccatatttttgccatggacagagcctggcgtaaagagggaacctgcaaacgtatcgggcatgagtggcatttactgaaatcactgcgccgccgccgttatgacctcgtggtgaatctggctgatcagtggtacagcgcgattgtgacccgtttcaccggtgcccgtatccgtatcgggctggatctgcggaaacggcagagtattttctggaaaaaatgttacaccctgctggcagatacctcacaggaactgaccatgcatacggtggagcagaatcttaacggattaaccccgctgaatctgccggtgactgataaccatgtcaccatggcctgttcagaggaagaccggcagaagactgaacagcttttgcagcgcaaacaggtgaccggtgactatattgtggtacagccgacatcccgctggttctataaatgctgggatgacgacaagatgagtgaggttatccgcacactggcggatgacgggcaccagattgtgctcagcagcgggccggatccgcgcgaaaaagcgatgattgaatctattcttgcgccctgtcagcaggctgttgccgacggaaaaattgtgtccgttgccggagaactgacgttgccgcagctcgcggcactgattgatcgtgcaaaactgtttatcggtgtggattctgtgccgatgcacatggctgccgccctgcaaacgccgatggtggctctgttcggcccgacgaaactggtgttctggtcgccgtggcaggcaaccggtgaaattattaaagcatcggattacggggaacagccggacccggatgacgtggacacaaggacggacgaacgttacctgagtccgattccggcagacgcagtgattaccgctgcacggagatatttatgaaaaatatgcgtctggcgattgttcgtcagaaataccgcccggacggcggcgcggagcgttttgtatcccgggcgctggaagcactggacaaccggaatctggagctgaatgttatcacccgttcctggcagggtgctgcggctcccggctggcatattcatgtggtgaatccgccgaaatggggacggatcagccgtgaacggggatttgccaacgctgcccgtgcctgctggcagaatgaaaaatttgatattgttcagagccatgaacgcattgccggctgtgatattttccgggccggggacggtgtgcaccgccgctggctgttacagcgggcgcgggtactgcccgcctggcgggcaaaactgttgtttgcctcgccgtaccaccgttatgtgatgaaggcggagcaggagatgtaccatgatccgcactttaagcaggtgatttgtaattcggaaatggtaaaaaaagaggtgatggaagactttggtttgtcagagtcgcaaataaccgtcatctataacgggattgattctgaaaagttccatccgctgccggaatcagagcgtctcgcgctccggcagacttatcagatcccggcggcggcaaaatgtctggtgtatgtcggttccgggtttgaacgcaaaggactggcggcggcgattatggcggtcagccgcaatgatgcgtatctgctggtggtcggtcaggataaggcagaaaaaaaatatcgacagctggcagcatccctgggttgtgcggatcgcatccgttttgcgggtatgcagaaacagacactgccgttttatcagatgagtgacgggctgctgctgccgacactgtatgatccgttcccgaatgtggtacccgaggcgatggcctgcgcactgccggtgatcaccagtaccacctgcggcggggcggaatttatctcacagggtgaagagggttttgtctgtgatgcgctggatattggcggtctggcagaggcggtctcgcaactgccctgtgatcacctgagcagccggatgtctgaatgtgcacggcagcgggttttaccttatacaccggcggcgttatcacagcagcttatcgatctctacgggcgggtcctggcataatgaaacagcatattttatttattattgacggtttaccgggcggcggtgctgaacgggtggtgctgagcctgagccacgggctggttctgaccggttatgatgtcactctgttatctctcagcaatacccgcgattatgatatcccggaaggggtggattatcaggtctctgcggatacttaccgtggcttgttccaccgccagactgaaatccggcgccgtgccggaaaaatggatgctttcttatctgatctgtttgcccgcaaaggtaaaccggtactggtggtgtccaatctgcataaaactgaccgtattgtcgccgcatcacaggcactgaccgggctgaatgtctggttctgcctccacggcatgttttcagccagttatctcggcaataaaaccggccttcgccgccgtctgaaacaggaaaaaatccgccgggtgtataacggacggaatattattggcgtctccggtgcggtgtgccgggatctgtgtgaaaacgtaggcgtgacgccgcagcagtgcgtgaccatttataacccgtttgatgttgcggatattcagtaccagtcgcagaaagataacccgtaccaggggcaggattacatggttcacctcgggcgttttcatgaggtgaaacggcaggatcggttactgaccgcgtttgcactggctaatctgccgtgcaaactgctgctggcgggacagggcagccagtctgccacacaaacactgaaaaaccaggtagctgaactggggctggaagagagagtggaatttatcggttttcagtcaaaaccgatgccgattatccgaggtgcgaaagctgtggtattaagctctgacagtgaaggactttcttctgttctgatcgaatcactgatctgcggcacaccggtggtcagtacccattgcccgggaggaatcggcgagatcatgaccggcgaactggcagcgtatctttcagatatgacaccggtgagtctggcggaaaaaatccgtctggtttatgaacacccgccggtgatcacccctgagatgtatcagaaatttgagcagcagacgattgtcagccagtactgtgatttaattcagccagtcccgtcaacacacgcgtgaggagcacaactatggcgaaacccgcttttatcattacccttgatacggaaggggataacctctgggaatccggtccggtgatcaccacgcagaatacccggtttttaccgcgctttcaggcattgtgcgagaaatacagctttaagccggtctggctgaccaactatgaaatggcaacggatgatgcctatattgaatttgcgcaggatgtgattgcccggcagaccggggagatcggcatgcatctgcatgcctggaacagcccgccgctgaaggcactgacgtcagacgatgatcgcttccagccttacctgattgaataccctgatgatgtgatgaaagaaaaagttaacgtcatgacatcgctgctggaagataaattacagactaaaatgctcagccaccgcgcgggccgctgggcattcaatgaaaaatatgcccgtttgctggcagaatttggttatcagacagactgctctgtgacaccacgggtgaactgggcatatactccgggagcaccggcacccatcggtaacggcggcaccaattacctgaattttccgtctgaagcgtattttatggatctgaatgatatccgccgtcccggggattcagcgctgttacaggtaccgatgagcgtacagttccgccattccccgctgatgaacggcctgaaacagttttatgataagttacgcggcaaaaaacgctcgccgtccgtgaactggctgcggccgaaaggcgggaatctggcacagatgcagcaggtggtggatgcctgtctggcgcagggaaactctcacattgagtttatgctgcattcatccgaatttatgccgggcggcagcccgacattcagggatgaggcggcgattgatgcactgtatgatgatctggagcaactgtttgcgtatatcgcccagcgggcggaagggatgacgctggcggagttttatcagcgcaaactcgcacagcgtcacgcatcataatcttaacgcggcatgtgctctgccatggcggcgagcacatcatccgcactgacagaggataaatccccgtcctttgatgtcagggcaaactgccccttaccgtaaccaccgatcagccccgggtccgtcgggccgtacagggtgatattgggtttatccagcgcggccgtcaggtggctcagcccagtatcgactgaaatcaccccttccgcaccggcaatttctgccgccacatccgccagtgataatttcggcagtacatgcacatgggtgaatccttccgccagacgcagtgcccgttcctgttcatgcggtgcaccccacggcaggcggacatgcagatcagtatcagccaactgggcaaacagcgcccgccagtgtgattccggccagtgtttggtatcacgggtggtggcgtggagacagaccagatacggcacggcatccggcgataccgcacggttattcagaaaatgggcggcaatcgcgtaatcaccctgtgtctgcggtttttcatagccgaggctcagggcaaaaagctgacggatccgctcaacagcatgctgtgttttgctgacagcgtgtttctcatcatagaaaaagctcgccagcggctcgcggatactgtgccggtcgtagccgtgtttgcggccgcgtgccagccgggtaaccagcagggcacttttaatcagcccctgtgcatcaatcaccgcatcataggtctgtgactgaacagcgtcgcggaaccggcggcgttcatcacggatatcgcggcggaaccagtttttccgccagcggcggatagcaaccggaatgacgcgatcaacagcagagtgccagcccgggatctgggcaaaaccctcttcaaccacccagtcaaaggtgagagccgggaatacctgcacggcatcggtcagtgcgggcagggtatgcagcacatcccccatcgacgaggttttgacgattaacacacggcgcatggcggggaactcttcagcaaatcatccagttcagacagaacctgctccggctgaatatcaatcaggctctgatggtagccctcatgggcatcccctttgcggactttatgataaccggtgatcaggcggataacgcgggctttctctgacagcggcggcgtgaaatccgggctgctcgggccgtataaggcgaccagcgggcgatccagcgcggcggccacatgcatcagaccggaatcattggtgataatggcatgacaaccggcgatcagattcaccgcctgttccagtgaggtttttccggccaggttcagacagttttcgcgctgctcatcactgagcatggcgaggatttcctcaccggcagcgtgatctttttctgagccgaacaggactatctgaaaatcacgctcatcaatcagtttcttcgctaattcaccgtagtgataatgcggccagcgtttggccgggccaaattcggcccccggacaaaaaccgacgaccgggcggtgatcactgatattaaacgcagccatgctctcggcaatatcctcatcacgcaccaccagcttcggccacagcaggggctgcggcagagcggcggcggcagggacatccgctttatcatacgcgagggcaacataacgctgcaccatcagcggaaaagcggctttgtcgagcttccggtgatcgttgagcaggccgtaacgcatttcgcccagccagccggtgcgcacagggattttcgcaaaaaacggcaccagtgccgattttaacgagttcggcagcacataagcacgatcatacttattatcacgcagggaatgaccgagacggcggcgctcaccgagtgccagtgcaccgtggccgatcggcatagcgacagcctcatccacttccggcatttttgccagcagcggacggcaccacgcgggtgccatcacatcaattgttgcctgcggataacgtgttttcagggtacggtaaaggctttgtgacatcatcatatcaccgacccacgacggcccgatcaccagaattttcatgtgcgtttaattaattcccctgatttaaccaagccatatattcacggacaccttcagcaaccgttttgaactcacccgggtagcccgctgcacgcagattagtcaggtcagcctgggtatacgcctgatagcggcctttcagtttttctgggaacgggatgtaatcgagcgcgcactggcgttcgctgtggaaaccggtcacagcatcggcgacagcctgaaaagattccgcgcggccggtaccgcagttgaaaataccggatttggcatttttccagaaccacagatttacatccgccacatcacccacatagatgaaatcgcgcaggaagttttcactgccggagaataatttcgggttttcgccgtttaaaatctgattattcagatggaaagcgacactcgccatgctgcctttatggccttcacgcgggccgtagacgttgaaataacggaaaccgcagatctgagactctgcttccggcagaatttcacggacatactgatcaaacaggaatttggaataaccatacacatttaatggtttttcatactgccgatcttcaataaagttatcactgcgcccgccgtaggtggcggcagaagaggcatacaggaacgggatctgacgatccagacaataatgcagcagttctttggagtactgatagttattatccatcatgtacttgccgtcccactcggtggtggatgagcaggcaccttcatggaatactgcttcgatatccccgaaatcatccccggctacaataccggcgataaaatcttctttatccatgtaatcggcgatattcagatcgaccagattgacaaatttggtgccgtctttcaggttatccacgactaaaatatcagtgtaaccgtcatcattcagtgcttttacaatattgctgccgataaatccggcaccgccggtgacaataatcatcacgcattcctctgttcggttcattcaagaaaatgaaaaaatcactgcttttatcatagcattgaagggggtctgacgtggatgaaaaattgcagcggcaggaagatctcccgtgttaccgggttgttttccgctgatgatctgttataccgtgaacactatttattaggttatcttattatgttatccggccggacagtgtctccggactttaaaggaatatgcatgaacccgaccactgttttccggttaccgctattatttgtactggcctatgcacttattctgagtggttcgctgatcctggtttcttacccggatgtcagtgtccgctatcctgaattatcattagcggcctatttgtcaaaagtatttgcttttcagctgattcagctgaccgggctttttactctgacatcattatttttttatcattaccggataacacaactgaatcgtaaaactgttctggcagttatcggtcttactctctttctgtatacagcaaacatgatcctcggcagcctcaaagcggaatggctcagtcatctgatggcgacaatgattgcggagaaagcggagtttgctgacgttattctgctggtcaaaaccgcagatattggcctgtacctgatctcatttgtattactgggtatcgcgacccgtctggtggcgaaatattatcttaaagtcagccatcctgcagttatcccggacggaaaaactccggatatttacgcactgttgttcagttgcgggatggtgtatctgatgtggatgatcgcattatttctgacggcggtgataacaccgcacctccccggcggcataccggcaccgctgtctgataatgcgtataccaccgcggcgggtctgctgatttcgtgcggtattgtttttattgctgtccgtcagcggttcccggtggcaggcggaatattgcagatcaggccgctggtaatttccgttctgctcagtaccgtgctcagtattctggttatggcggcgatcaccgccggaacggtttatatggtattactcaccaacagtttccggcacttcggggagactgagttatggattataactgcggtttgtgtcgctctgacactgtggataagccgtgctgtcaccggtgtgatgttccgccggtgataatctgatcatactgtcggccgggctggttatcccggtcctgctatcgctgagtctctgccgccggttcagccggtactttttccgcggccttcaggtcagtgctgactgactcttttgccgcaggcggcgcggtatccggctgcggtagcgccatgcggacggataacaggacttccgccactttgccgttcatctgatctctcaggagtgcttccgtcagcagattgatatagttggtgtagaactccccgccgatttctgctttaccctcacactgctcagtcattggtgtcagccacggtttttccttcaccaccggtttgaccggcacgaccggtttctccggctgcggtttcacggcagatggtttaccggcatgcgtcagcatatatcccggcgataccagctcaatatccggcggcagttgcgggatgagtttatgcagtgcgcggaccgtcgacggatgcgggtgcccgatagcgatcaccgacccctgtttgcgtgccagagcaacagcccggttcagttgcttgcgcgtctcttcctctgtctgcacattatccagaaaaacctggcggcgcagtacgcgaaccggtgttccctgtgcagcctgtgtcgctttggtgctgccgatggtcacactgtcgaggaaataaaaaccggagccggagagagacgccatcacatgctgcatggcggtcagatcagaggtcatcgcgctgcccatatggttattcatgccggtggcatacggcacccgggcaatcgcagctttaatcagggtatcaatttctgcggcactcatggacgggtgcagagtgtcgcgctccagtggctgtttgctgatcggtgccataggcatatggataagaatttcacggccctggcggtgtgctttttctgccatttctttgccgaacggggaattcggcaggatagcaatggagacctgcggcggcagttccaggatgcggttatcatcctgtttgcggtaaccgaaatcatcgatcacaatggcgagctgcgctgcagcggcagaaaacgttatcagtgacgaagtgataaaaagtaacgaagtcagtacgatatttttggttttctgccggtaagtcactgtgtgctatctccccagccagggctgcgggttaaccgtccgtccctggcgccggatttcaaaatagaggcccggtctttcctggcccccgctgctgcccaccagtgcaatcggctgaccggctttcacctgatcacccacattcaccagtgcgctctggttatagccgtaaaggctcatatcccctttaccgtgctcgaccaccaccatcagaccataaccctgcagccagtctgccagcaggacccggccatctgccactgcttttacctgtgtgccttccggcgcgccgattaccatgcctttccagcgcagttcgccggagatactgtcaccgaaccggtgcagcagcggaccacgaaccggccagatagcctgaccggccggacggcccagtcccccggtgcgggacatcagcgagcgctcgtcctgagtcggggtataggtggaaccttttttcttcgcctgcgcctgtttctcgcggatacgggcggcttcacgggcttcgcgttccgcacgggctttggcttcgcgctccgctttggctatcttgttacgcagctggctttcgttctcccgcatcaccagcaaatctttctgatcggctttcagcgagcgctccagctcagtcagggtggatttccgggcggtctgggcacgatccagctttttcttttcagtctgctgtttgccgagcaggcttttatgctctgcacgtttttgttgctcagtctggcggcgggcgtgtaactgctgcgtggtctcttccagctctgcaatggttttttcccgtgcggcaccgatataggtgtaataggcaaggatccgctcatcgcgctggccttcctcacccttgaaaatcagttcaataccctgatgacgcccctggcggaatgcggcgtccagttgttttgacagcagcgcccgctgggctttctgcttcgcatccagctgtttgatttctgcgctgagagtcgtgatttcactgtcgagctgtttcagggttttctgtgtggaatagagttcacgaccggcagcggcgatatccttttcctgatttttcagctgggttaacagatttgcacgttttccctgctgctctttgacgctcttttctttctccgcgatattcagctggagatttttcagctcattcttgctggcatcggcggtggttgtattggcggcagaaacagcaaaagagaccggcaacagcagagctgccagtaatgtgcggacaccgggggacacccggcgggaatgcgtgcggaaaacgtgcttatgcgccaatttatctgaccctgccgttacgccaaagaaacgatcgtatttaactattctaaactgcaattattccatgccatttaaagcgttaccagtcctgttatccgggatttacacttcgggacaatccggcggcggagattcatcgcgaatttgttgcgtttgttttttaccttagccgtgaatcaatggtaaattaacccctctgtctgtcggaaaaatgaattttcgcggcatgcgccgcaaaattacgatgaaaacagccataacccgggcaagaccggctgtatttgaaccggcacacaggtatacttctgccctttgatctttgttattaaccaacgggagttattgtcccccatgctgcaagaaattatgccatttgtcagtaagcaccctattatcagccttgtatgggtcgcgttactgatctcagtcatcgtactgactgtcaaaggactgttttcaaaagtgaaaacaattccgcgttctaccgctatcgcactgattaataaagaagaagcgattgtcgtggatacccgtacccgggacgatttccgccgtggtcatatcattgacgcggtcaatctgacgccgtcagaaattaaagacaacaacctcggtgaagtggaaaaacacaaaaaccgtcctgttatcctggtttccgccaacggtatggagctggtcaaaccggctgaaagcctgctcaaagccggttttgaacgtgtatttgtgctgaaagacggcctctccggctggaccggtgataacttaccgctttcccgcagcaaaaagtaatccggcaaaggatgattggaacatcccctttgtaactcacactctttatatggatatcaaaaggtaacactatgtcagaacaacaaaacacagaaatgtctttcaacattcagcgcgtttacaccaaagatatttcttttgaagcgccgaatgcacctgccgttttccagcaggagtggcagccggaagtgaagatggatctggacaccggctcaaccaaactggctgatgacgtttatgaaatcgttctgcgcgtcactgtgacagcgactatgggcgaagaaaccgcattcctgtgtgaagttcagcaggccggtattttcaccatcggcggtctggaaggtactcagctggcacactgcctgggtgcatactgcccgaatatcctgttcccgtatgcccgtgagtgcatcgcaggtctggtcggccgcggcacattccctcagctgaacctggcaccggttaacttcgatgcactgttcatgaactatctgcagcagcaggaacaacagcaggctgcgcaggaaggtacacaggaagcataatgacagacgcttctatgactgtactcggtgccggttcatacggcaccgctttagcgatcacactggcccgtaacgggcaccgtgtggtgctgtgggggcatgacccggaacatatccgtcagcttgaggctgatcgtgccaaccaggcatttttgccggatgtcccgttcccggataccctgatccctgaagcctcccttgaaaaagccctcgcggccagccgtaatattctgctggtggtgccgagccatgtgttcggggacgtgctcaaacgtgtcaaaccgctgctgcggcctgatgcccggattatctgggcgaccaaaggtctggaagcggaaaccgggcgcctgctgggtgaagtggtgcgtgaagtcctcggggataaaattccgctggctatgatttccggtccctcttttgccaaagagctggctgccggcctgccgacggcgattgctgtcgcggcgacagaacctgcctttgcggatgaggttcagcagcttttccactgcggaaaaagcttccgtgtctataaaaacccggattttatcgggatccagcttggcggtgccgtgaaaaacgtcattgcgattggggcggggatctctgacggaatggggtttggtgccaatgcgcgaaccgcgcttatcacccgtggcctggcagaaatgacccgcctgggagtggcattaggcgcagacccgtctacctttatggggatggccggtctgggtgacctcgtgctgacctgtactgacaaccagtcccgtaaccgccgtttcggtatgatgatggggcagggcgtgagtgtggatgaagcacaggagcgtatcggtcaggtggtggaaggataccgtaataccaaagaagttcgtgcgctggcagagcgtgcaggcgttgaaatgcctatcaccgagcaaatctatcaaatactctactgcaataaagatgtgctcgaagctgcccgtgccctgttggggcgtgccaccaaagaagaaggtgagcacttttaagcccgtttttttatccgaagtctgtgaggtaattatgtcctacgaagaactggaagaagtctggagctatataaagcaggaagcgcgggactttgctgattgtgagccgatgctggccagttttttccatgcgacattactcaagcatgaaaatctgggcagcgcgctcagttttatgctggccaacaaactggcaaccccgaccatgccggcgatttctgtccgtgaagtggtggaagaggcgtatcacaatgatccgcagatgattaaatccgctgccatggatattaaagccgtccgcctgcgggatccggcggtggataaatactccacgccgctgctctacctgaagggcttccacgctttacaggcttaccgcatcgctaactggctgtggaatcagaaccgccgcgcgctggcaacctaccttcagaaccaggtttccgtgacatttggtgtggatatccacccggccgccaaaatcggccacggcattatgtttgatcacgcaaccggcattgtcatcggcgaaacggcggtagtggaaaatgatgtctccatcctgcagtccgtcaccctcggcggtaccggcaaaaccggcggtgaccgccacccgaaagtccgcgaaggcgtgatgattggtgctggtgccaaaatcctcggcaatatcgaaatcggacgcggtgccaaaatcggcgcaggctccgtggttctgcacccggtcccggcacacaccaccgttgcaggtgtaccggcaaagatagtcggtaaaccggggtgtgaaaaaccctctctggatatggatcagcactttaacgggtgcgaggggatttagtttcctgattcagcagccaaaagtaaaaaagacagccaaggctgtcttttttgtgactgaaatacagaacacattaatcccgtaataacgcccctgcataatccagttgccgccaggtttcaaatacaattactgcaacggtattggataaattcatactgcggctgttcggcagcatcggcacgcggattttttgatccaccggcatattatccagcacataaggcggtaatccgcgagtttccgggccgaacaacagataatccccggcctgatagctgacattactgtgtcgtggtgtgcccttagtggtcagtgcaaacacccggttaccagtcggcgactgagcattatcagaactcagcccctcgctttcgagaaaggcataataatcatggtgatgtttgatatccgcaaactcactgtaatccagcccggcccgccgcagccgcttatcatcccaggtaaaccccagcggatgaatcagatgcagccgaaagccggtattggcgcataaccggattatattgccggtgtttggtggtatttcaggttcgaataagacgatgttgagcatggtattatataaactaataaaaatgaggaataaaaaatattagcagattaatttattttttcttccaaaggagaaaatgagtagtaaagaaaaaataatttgaataataaaaataattagatatgtattttcaaattctattttcatatagggtgataatactatcactgaacaaacaaagataaaaaatgaagtaattataataagtgttattttatttttatagatcgcatataaagaaaatccaaaaaattgaaataaagaaattgataagtatgaaaaaacaacagcgtattcccatattaaaagcattgctagtaatataaatatattatagatagctaaggctattttaaaataagagatgggagtattttttctcttaaaaaaatagtccataaaaaatatcataaatgatgaaatattaatcaatataaaaatatatctattgtatgagtctccataatcagccacgtaacgtctatcaatgaatacataaatggatgtcaggaatgcatagaataataaattaaaattaatagagctcttgttattattatggtcaagccagatatttttattttttaaatttaagaggaaaagaaataaagaaaataaaaaaaatggaactacttgtataaaaacacgtgaataaatagtgcttaatgttaatagagataaaataaaagataataacaagacaaaaaatacaaaataaagtctagagataaataggctatagaatttcattctaaagtcaataatagagctaaatacaatcattaaagcgaaaaggaatggaaatatcatttctgaaatattagctatatcaaaaaaaatcaatatcagagatagaaaaatacttctaacaattaaatgaataatttgcctaacattaaaaaaagaaaactctttatctgatgtatgcccaagggatattacaaaaacatataattgtattattgctgttgtttggaagaaataatatatttgagcatcgttaaatatatctagaatagataatccaggagcaatggatttaaataagaaaacaagagctatattaaacgttataataagattggttttatagagggtcacaataaaccattccttgaaaataagaattcattctcaaaagatttatttttagaataaacaaagctatatggtatacctgcaagttgagcatcgagtagcatagaactggatatagaatataaatatgatgctaaatttcctttatactctctattggcatatttacaacgaaaatcatcagagcaacgcggatgaaatcttatcaagatgtcagtattttcatctaaaaattctgatgcagtctcttcgaagctaaagccaaattggccgataaaaactttgggggcatcaggattaaaatgaaaatatgatctaaaaaataggtcacttagtataataatattttcactaactccgttatttattacttgttgtttttgttgctgtgttccgacaactatcggcattgttcttttttccaaaaaataatatgtcggatgttgtggatggattacaccatgagatacttctattatatcaccagttgatatgaatatagctgcatctggaataatggctgctgaaaaatatattcttatattgtttttgtttcgagatattagttttttaattatagctacaaatagtatatcacccattgctaaggctaaagatttaaaatcagaaccagataatttagatttaaataataaacataaaagtataaaaataaaagctgacacaggcaataaaaatatagagaataaagttctcagtaagtatgctaaatctctaaatgaggagtggttctcatattcgttaaatgaataggtgttcatgttctctatatcagatagattaacacgatttaatttaaaataaatatcaactttagagtttttaattaatttaacgaatgacgaaagaagtttaattgaggatagtcttatttgttttgtttttaatctattgcttagttcagactctaaataatttttccttatatataaaaaaagtattttgaggaatctgctttttatcagaaaaggacgagaagtcagaataaatatattaaatttatttttcacgtatatttcctaacgtattaattattttttccatatctttctcttcagaaaaaagtttaactagaatattatcatccaacatccatggttcaagttttatgagttttgctactatctcaggagaaaatctttgttttattaaagtggcaggggtccctccaacgatttcataatctccgacatcagtagaaacaaaagagttacatgctataattgcacctataccaatttttactcctgacattatcgtacaatgggatcctatccaaacgtcatgtccaataatagtattatctatttttttgttaaatgatcgtttggaaaatcgttgaacaggaaaatgataaagatgatttaatgctccaatattgcaatgagagccaatagatacaccgatccctatattggtatactgaatttgattaaaccaaccaactgagcttttttcaccgagtatagaatcattaatacgagttagtgggctcacgtagctttcattttttagtatagtattcctgcaaattgaaagtatacttttttttccacgacgactcattggttacctttttatataatttttatctatatttatactttcgaccgcaagtattataaaaatgagatatggtgtatagtatatagagttttgtaaacttagaaatattaaagcagatagtatgataatatttttagaattctttaactgtataaatagcaatgacaaaagaagtacaccaattaaacccagttcacttagaattaataaaatatcgaagtgcatggctggttggctctctgtcacgttggcaataagaaaatttatactttcaccagggcctgcgccaaagtaaaaatatgatttccaaagggttattcctagattaaggaattccatacgactatagttagaaccaaacgaggtgtcaaatgaggttgaaaagcgctgattaacgatacctaatataatgagtgaagatattaatgtaataactgaaagtaacttaacagaaaatttactcgttacccatggtttataaaatatgaggaatagcaatattaatataaaactacgagaaccagtcatgtatacatgagctaaacacattaactttagaatgataataaagtatttattttttacagtgcttgttgtctcaaatattatgataaggagtatacacagcgttatgataaaatcagaaaaaactattctctgaaaagtaaggccatatgttctatttgtattatttaaaaataaagtagttccggtgtataattgtattatgtccgaaattacataggcaaatacaactaaagctattaaattagtatcttttactgatatacgtattctgcattgtgctatcatgtataatgataacgcaaggaatgaatatcgtataatccatattaatctataattactaaataaaacatgataaaccaaaagcgcaataatagaagccagagtaaatgtaccaataatggattttatatcaaattggttaggagtaaatatagggattataaatcgcattgcaactatggaaattaatattgcattgtattcgctaaatggaaggaagccacctaaagatagcaataataaccatggtttataatttaaactctttgaatttatgtatatggtcatttaatacttttctcaatttaaaaacctgaataaaactaattgggtaagtatatagtactctttttaagacaaaaggctgacgcattattctgcataaccatcttggtagccttgagtattgctctccatatatatcaccaaaaagaccaacttgtgtaataaaaccaccacaagtaaagaaatcaacattagggtgttctttggacaaatataataaatcagtttcttgttgtggtgttcctctgccaataatgacagcgctataattatatttattgattaactcgctgatatcattaagtctaagagtaaacccatcagtgcatgtcacatttttagagagatttttatcgcttaggtaagatataaaattatcagtatgttgtttctcccccccccaaaacaatacctttccttcgaaggagtaatattttattgttttttcagcgatactgctccaatcaaaactatatctttttatattagtgccaaatagccaatttatttgtttaactagcatggctccatcaatatatatattgtcaacattatctaaaactaaattaagattttttgatttatatagtgaatataatgaaaaatgatttatgaaaatattacaagccatttaatctactcgataagaagagtttaccattatgttcaagctcaagttgtctttctttatgaagacaagggttgtttaagaaattttctatatcaaaagcatcacttttatttaaagtatttctaatattaaatttatcaatacctctgaagatggcggcagtgatcttattgggatatttatttaaaaatgataagtttaattcatgattatatggccatattactgtatcattgaacaataaattagatcccagccccctgctatcttcaactaaaagtttagatggaagattattttgtaaaaaataataatgagaatgtaatctaaaaccaatatgacacttgtaggtatcatattttttcatgccatgctctccggatgcatcgattacattaaagcctttattctgaagaaaattaacaaaaatattagtttttctttgggtaaggccagatgtatattcagatttatcccatcctcgattaaaaagaatatctacatcatagcctaaagatattattttatttattagatcataggtatacgggaaataatcatatcgctgtggtgctgaaatggcaattttattatttttgacaacaattttgtccattgactctcgaagataagacgctgcacagcctgtaacaaatgcagtatctaaattgaatattttctttgttatttcatctcttacacttatattttctttttttccagagaatggaagtgaagaaaatttagttgaatagttaaataagtaagaaccagcaccaaaaaagatatatcggcaatttttatgtggcgctgctgacaataaatgttgaaatttaaattcaaatacagggcctccactaaatatgatagtttcattacatagattagtattaattaactcactatataatatttttttatattctaaatttgagtttttttgaaaaaaactattaaaactatcacgaattaaaaaatcaccgctgtttttaactgcaccgttggctaaaaataaacccaaaatcattctcctttaaataattgtaattttacaacctggaatgattctgcaaattcaacatttatttccatacctcttgctttgtcttgagcttcaataaatgattcccaatgttttccaaatttagtaacctcagatacatgcatattaatagcattttttttgatttgataaaaatcggaaacatcaacgaaaatactctcatgaaattgcactgatgtccgataccagtttggtcgatacattaatatactgcctgcttttcggcatacagtaaaacttgatttagcaactgcagcatgatcttgatgtacatcttgatcccaatgagtaaaaactatgtcaggttttatttctttacttagtttttcaagttcatgaattaattgatgtccatgtgtcagctttcctgtttctaagtttaattcattgatatacttaaaaccaagcgtttttagaccagctaatccttcatctcgtgcaacagatgattctctaacaatatttccatactcatctgaataaccagaatttgttactatagtcacatggcattcatgtccttgtgatattaatttcgctgcagttccaccacatccaatttcgatatcatcaaagtgggcaccaataaaccaaattttcattctgttatatccttccaaaaataatattcattcgaccgctttccactaatatggctaaatagtccatcagatatggaaattccattttttcttagtttgtcaatttcaatagcagagatattttttgcagaaacaatatgccttgttgaatattcgtttgttaaagcacagtattttgaatctaaatttaatgatgtatagttaacctgattaaaggaaaaatcatttaactctgctatatttttgatatcaaaaaaaacgcctccccccccatatctataatattttcctgctcccatggaaatgcatgaaaataatactttcttgttagctatacggaatttttctaaatagaatgctaacgtttcatatgagcaatgagctaaatccagtactattttacaatctggcaatgtatggatatctatcgttctgaaattaaataaatcagatactaataaaatatcgtcttttcttaatggtggaataatgtagttatcagaaattgtccagtttctgtttactttataaaatgaaatattaaaatttctaaggcgattgacaactgaaacacaaatgtcttccggtaaaaaaatattgtttttttcttgattttttagcttgacataaattaattcggaacaagattcatataagctaatcattttttatccaacgaaaattttcggttaatccaaatatctttaatacatctttgtgatttgaaaacatattggccgtttgcatctctttctcttcccgcgtaaaaattataatctttttattattggaattctccattatctctagtagtgtattgccggcagctgtaataatataatcactactaggtagaatttgtaatattggaacatctatgagtaatgtgctgttgtcccttttttttataacttcactaagctcattaatatatcggcaattatttcctatgcatacccaagtatatatttcttctggtatttcaagaaggatttcaggtatttttttatgatcatcaccccctccctgtactataagagctgaggtttttttctttggcatagtgtgttttttaaatgggaaatcagtactacctattgttgggtatagtatatgatattttttaaaattagccttgcatggtctttcttctaaagaatctaataaccaaacttccttgtattccccaggtaatgtaaatttacctaaggtgtcattaattaatatcttattctggctatttttaattacaggttcatgatagggagtttttaaataattattcgcaattattatatctgatggcttctcaaaatgaatgacaattgtaacctcagattgaggtaatgaatttttaaaatgaactgccctagataggtgaccactcccccatgtctcaccaaaaattacataatatatgtagctcactgtaatccttttagcatttcatattgacataaataatctaatgtcaggcttgttattttcagatcgatttcctttgcattaaatgggtctaaaagaaatccgcacctaatgttactattatttagaaaagcttcgcttacatgctcttgtgcaattctatcagcagttttatatacggttctcagtgcctgagtagtaaatatctcaatgcccagtccttgaggtacattacatccatcatctgattttgaagatagataatcaaattggttatcaaggaaatgtttaattgacttgtctactaattgataatgaacaaatggattatctccggtcgcccgaatgataatatcggcatccaaatggtcagctgctgtcatatagcgagatagaagattatcgtcactaccgtatactattttgcaattctgagaagctgatatccaaaagggatcttctgattcaccttgtggagctaggatagcaacagtatattgattattataatttttccatttgttgtatatattttcaatcaatgttttgtcttgaaagaacggtaaagcacttttacgaggaagccgtgatgagccaagtctggcttggataccgattaaaatttttggcatattagttatttcacgataggtttgatatagttacacttagtagattagttaccaaggtcatcccatgttaatacagcatcaatcggcatatctttatttactgtccgtccgataagatgattgtatagtgatgcttcaatacctgttcctggtctttttacacaaattgattctcttgtaattacttcacctttctttaaatctttatttataacgactgattttcggttattacgacggttgattaattcttggttgacaggcatttttataccactgcctaatgcgctttctactatgcgtattgagtcaactaaaaatttcatttctttaggatcacttgataaaatgtgatcaggtccttctgcatttctatcgagtgtaaagtgccgctcaataatatctgcaccaagtacttttgctgcgaatgagcattgcatcccgatagtatgatcagagtatccaactacaatacccggatatctattttttagtgttgttataacattgaggttagcaatgttatattccgttggataagatgtaatagcatgcagtaatgcgaagttattatttcccgttttcgatattgcatcgacaatatcgtctacttcttttaaagtacacataccagtagctacaattaggggtttatgtaatgctgcaacagcagagataaaatttaaattattgctatcatctgaaccaattttgtaaacattatttccgatatcttctaataactgaaggtcgctctcatgactgggtgttgaaaatacatcgagacctttacttcggctataagaatacacttcttcgtgtaagctcttactaatctcaaattctttgaacagattatactgacttacagcgccagtatttttcatttcatacttagctattttagatgcaagggtgtcagcagtgtatgtttgtaacttaacagcatttacaccagttgttgctgccgcatcaattagtttttttgcctcttcataagttttaaaattaccaccaatttctgcaataatatagcatggtaaattatcaccaacagttttattttctatggtaaattttctcattatagactccaacctttcctaatatattcttttgatttttctatgccaatattggatatcaagtctattattgacatatatggtacgaattcattcttattattgaattgggtatatggttctatattataatcttgatatataatatttatgctattatcaatgaagtctttctctgataaatattctcgtccatctcttccgctaatataggtacttgcacccacagttttacatatatctaatattaattcagatgaacttgttactaggttaagttcgctacttaatattatatcacaatcaatacttaataatttcttgaaatataagataatactaatattaaattctgataaattagttcctgaggtattaataagaatttcaaggccgttttttatttcataaaaaaatggtgatttgttataagtttgtagtattgtagtccaatgtttttgtttccataagtcattgcttatttcgatttcatttatttttttattgctacttttatttactggtatagtaagaaaaatactattattttttgtcaggatcctatttctattttgatagtagttttttctgaaatcaacactatttaatattacatatttatcacaattcatcattttattaaagaaaccacaccatgggtagctttcaggctgatgtattgtaattataagttcttttgctttatccataataactttaatcctatagtgtaactatagaccatctttttttttgtgatgtctcgtgtttaccgaaaagtatatagtcaaataagaaattcagacttctgtcatatcaaatagctatgaataactgattattttcaaccatagctaccgcactgggttaccgctcccagagtgcgctattgcgagtttatcttactgattctattgaagaatcgagtcagtaagagttgtagtgtgttacagagggctgatttttcaataagttgggaggtgttttatgcccaatcaatcagctctgtttatatgtgctgccaaaggctagtccgattacacgaacaggtcaagcatgataacactcgcgagtctttcattaaacgaactttatccggtttaatgtggcaatctttttctttaaatctgtcttttttgtgttaacagcagaaaaagtgttactttaagccagagctttggtttattactttttctaatcggtacatgcacaatcacagcagaaatgttttattacatcatattgatggcaatggtaattcctgcttaagaaggaatagttaccggggctgattgccccggtaactacagagagcctcagcgcgggtgcagcggcagccagatttccaggcgaagtccgccgagcgggctgtcgttggcggtgactttaccgttgtgctggctgatagcggtgctgacaattgcgagccccaagccggtaccaccggattcgcggtcgcgggcttcatccgtgcggtagaacggacggaagatatgttcgcgatcttccgggctgacacccgggccatcgtcatccaccacaatgctgatacctttggtgtcagcactgaatgcgacctgaatatgctgatttgagtagcgcagcgcgttgcggacaatattctcaaatgcgctgccgagtgcggacgggttgcagtaaattgtccacgggcccggcggtgaggtgatttccagcgttttatggcgctgctctgcctcaaacttcgcattgtcgagaatgtcatcccacagctcattggccttgatgttctggcgcagcagctcatttttgtgctggctgcgggagagaacaagcaggtcattgatcatgccgtcgaggcggtgggtctctgtctcgatgcgttccagctctttactttcaccgtggcggcggcgcaatagtgccgtagccagctggagccgggtgagcggggtgcgcagttcgtgggagatatcggatatcagccgctgttgtgcgttcaccatgcgttcgagggcactgatcatctggttaaagctgttacccgccgcaaggaattcctgcgggccggcttccagttccggatgctggcgcaaattacctttggccacatcatccgccgcgtttttcagttttcgtgccggttttgccaggctccacgccagccagagcagcagcggggtgctgatcagcatggtggcggccagtaacaggaacgggcggtcaatcaggaagttgataaaatcagactgtgcggtgttcgccgggcggataagataaagctgatagcggtcttcgccgtccctgacttcaaacggcccgagcagctcaatgcggccgtaacgtttctttttcgggttgtcagtgttatctgactgacccataaagttacggatgacctgggaatcattgcggataggcccgatgatccggccttcagtggtgacaataatcaggcgcttgtccggcggcgtccattttaccagggcgcgggtcagccgccgccaccagagcaggtcattcgccggatcctgtgcgagatcagattcaatatgttgctgcagcatcataccctgccggtactcagcctcctggagcggcatcagctgccgggagtcgagcttcggcaccatcagcaccagtaacagcaccagcgccagggtaaaccagaagatggcgaaaatccgcgccgtcaggctgcttatcatgttgcagataccattaagtaaccacggccgcgtaacgttttaaaccacggcaggccgtctgtgcgctccggtaatttgcggcgcaggttggaaatgtgcatatcaatggcgcggtcaaacggcgtcaggcgtttgcccagcacttcctggcttaagtgttcacggctgaccacctggccgaggtgctgtgccagcaggtaaagcagcgtgaactcggttccggtcagatccagtacttcgtcaccgaagctggcttcctggcggcccgggttgagctggagtttatccaccatcaccacggaagagttactgctgctgtcgctctgctgctgttgctcactccagttggagcggcgcagaatcgcgcgtatacgtgccaccagctcgcgatcgttaaacggcttcggcagatagtcatccgcacccagttcgagccccagaacacggtcaaggtcactgccgcgtgcggtcagcataatcaccggagtctggtagttctggcgcagttctttcagggtttcaatcccgtttttgcgcggcatcatgatgtcgagcaataacaagtctatggaatcgtcaaggagggtcagtgcctgctcgccgtcatgtgcaatgacaacgttgaacccttccatatcgagtaattcttttaacagcgaggttaattcgcggtcatcatcaacaagcagtattttattcattattcacgtcctccacgtgcaaaatacgacaacaaacgtttctattccatgactttacgttcttttacatgctctgacgcatgtttgcagccgggtgcgtatagttaattccaacgggtcaggtgacgcagactcagaagtttaaggagttactatgggtaagatagcaacaatcactttagcgtcaatgtttgtgatgcaaagtgcgccgggactggcgcaggattcagaaagtgatggctgcgttaccccggtgcagagtcacagtcagtataaaggtataacgacatcagggggagatggttatacctctatgttgaccggcatccggttaacggaagaacagcggatgcagttgcgggatctgatgcacaattaccgcgaccagttacggaatgtccgtaaccttgcagaagatgatattgcgctgtacgagctggttaaggccgaaaagtttgatgaaacggccgtgcgtaatcagcttgaaaaggagatgcgcaagcggctggattatcaggttgagatgatacgggttcaccatcagatgtatcagttactcaacccggagcagaaaatgcagctggatgccaattttgagccggagagtattcatacctcatccgcctcctccgcgcagaatatgccggaatgaatttgtcagaagttatttgtcagaaataatttgtcagagtagtgaagtcagtagagtcgttaagtagcacccaagaagtttttccttgccatagacaccatccctgtcttttacagcccctcttgaggggcttttttttgcctgttttttggcgccggagatgccgtagataaaaaaagcggccttgcggccgccgtaattgaatcacaacgggaaattaaaagttgtagcgcacgccgatattgccgtgcagcggcgattctgttttatcgcctttacggtaatcgatttccgcatacgcctgaatctgcggcgtgaaacggacagtcaacccgccgccggctttcaggctgtcaccggagaaatcggtgtcgaacgtattgcgctggttaatggtcacatcattattgctgataaactcatgctgccaggccagtgtggcgtaaggggtgatgatcacctgattgttcagggtgaaatctttgcctgcgtgcaggccgagttcggattgcagggactgctgtgcatccagttttgcctgcatattattgttcagatgaactgatttgctgtccgcacgcatatagctcaggcgggcatacggttcggcccagaaggcttccggcagatcaaaggtgtaaccggcctctgcggatgcaccgtaagcattctgtgaataatctccgcggatgctgctgcggttggtggaaaccgcacgtaactcattattgaaatggttatatttcagcacaccatcgaggtaccagccgttatctgagaaccaggtggcataaccaccggcagtaatactgtcgatgctgctttcgccgccgcgctgatgcttcagtttgacatcgttatagccggtaaagacgccgagcaacaatttgccgttttccagcgggacagatttatccgcacccagctcaaaaccggcctgattcagtttaaagtgtgtgtgtccggtgcctgcacgggttctgtcgccggtcagacgcacccagacccccgcatcaccctgattatcccgtaattcgccgcggcggaaccgcagattgtcgagttcgtgattaaaaatcagctgcggcgcggcagccatggataacaccgcatcggtggatggtgtggttttatcctcaggtacgaccggcggaaccggtttttcaggctcgcccggctcatctttctgagcggccagataccagattttgccgtcctgctcatcacgctgatagagcgagtacatataggtcccgccgtccaccgcatcaatattagtgccgtcgagggcgctcaggcggaattgtgcattgctgctttcgtccgtgattaaatcaagacgtgattcatccggacgggtaatttcagccccggaatcctgtatattcagagcatgatcaccactgctgttacggatagtgaggtaatcaccctgttgctcggcaatggccgtgttcatatagaatgtctggctgccggagagattttcaatgatcagatggctgtacccggcgttgaccggtgcaacaaaccggacctgaccctgtccgctgagcgaaccggcaaaagcggcattcccggtatcaccggtgatcaccatcagggtgctgtccgggccggataagataacattttccgcataagctccggcatccgctgccagtttgtcttctgaaccggcagtcagctgtacctgcgactgctgattaacagtcgtgacgccgaggagctgtgcccctgccgccagccagcttttggcgcgatcattcagcgtggtatctgtcgcagaggagccgctgtaaatactttgtacggcggtgtcatataattcgttattaatggcttgtccgccacctttaataatctgggcgccgccgttttttatccggttaaattctgcaataccggcagatgcagatgcattctgattgaaaatatattgctggccgccgtcaacggttgtattggttgctttggaatcatcgacaacatattgccgtgctccggcgtttacgagggtattatcggcaaaacctttaccgtgcagttgctgtaatccgccatcattaataatggtgctgtccgcaaacccgccggatttcagcatctgagcaccgccgttattcacgaccgtattcagggatttaccatcctgctggacatattcataaccgccgtcattgacctgtgtaccggttgactccccgcccaggtaaataaataatttcccgccgctgttgacgatattattttcagacttgcccggatcatcggctttaccggtattactgacataaacggttccgccgttgagtacggaatcttttaatgttccgccgtccagaacacggattaatccgccgctctgaatatcaatacggctgccggtggccgggaaaccggtgtgatagccgtcccaggcaatatgggttgttttatcaatccagacttcagcgccgccctgaacctgagaatcctcaaacaggccgagtacgctgagtttactgccgctcagcatggtcagattctgagcaatgccgacataatctgttggcttaccttctacccaggcaccaatttcatagcaatcatcagcggtcatttcaccggtgaaaggtgcgcttcctgtcaggcccacatttttacggctgccgcaaaatgtttctgccataactaatgatggtacggttgaacataagacggcaataatggaaaggtgtaaaagtttcttttttgttttcattagttattccctggtgtcggtatatataacgaaagccatttcgtcagacggaaatggtaaatttaaaaggtgtaaattttatttatgagatgagtatcttatttaaggtttgtttaatcaatgggagcgaaaatgcatatttaagtgatttttttaagattcattgacggtaatgaatcttaatacacattatgaatgaagctaatctgatggtttttttatttctttggtcagaataaagctctggttatgtctgtttttgggttatttttgttatttaaattccatatttgatttatcaggggtaatggatatacccgcgacatgcgtaatagcggcggtgtaataaatattaatttagtatgacaaaatattactgatatctgtttttcaaatccggccataaattatattcaataattgcaaaaaaatattatataaatttctattgcattatttatgtcacgatgtgagtaatgaaataatttcttacggtttgtttttgttaattacataatgtgcggtaaatccggatatatattctttcccggatatgccttttatttcagatcctgcttttgacccctgcttttccggtaacgcattatttgtgaaaaaaatgtttcatatccgctaattattttttgtttttcgggtatccttaacgggtatgctgagtaatcctgcggttatgacaggcctgtgtttccggtgtctcaaaatgacaaaaaaatccgcaaagataggtgcatccggctaaaccttatcttactataggattaggtgaatcaattcagcaatgcgttacagcagtgaattcccgaagcctgaccggggaagcgtgataacatgccgctcaggtttttcagatttacacatattacatctgcaaatcagaggtcatcatgagcaagaagatcaaacgaatcggtgtgttgacaagcggcggtgatgcgccgggcatgaatgctgcaatccgtggcgttgtccgcgctgcgctgtcagaagggctggaagttatcgggatttatgacggctatctcggcctgtatgaaaaccggatgaaacagctcgaccgcttcagtgtctctgatgtgatcaaccgcggtggtaccttcctcgggtcggcgcgtttcccggaattccgtgatgacaaagtgcgggaaaccgcgattgaaaatttgcgcaaaaatggcatcgacgcgctggtggttatcggcggggacggttcttatctcggtgccaaaaaactgaccgaagcgggtttcccgtgtatcggcctgccgggtactatcgataatgacgtggcgggaaccgactacaccatcggctattttaccgcactggaaaccgtggttgaagctatcgaccgtctgcgtgatacctccacttcccacaaacgtatctctattgtagaagtgatgggccgctattgcggtgacctgacactgtccgctgccattgccgggggctgtgaatttatcgttctgccgccgaatgaagtggaatacagcagtgatgaactgattgcagaaatcaaagccgggattgataaaggcaaacgccatgcgattgtggcgatcaccgaacatgtcaccgacgtgtatgagctggcgcggcagatagaggcgacaacacatcacgaaacccgtgcaacggtactggggcatatccagcgcggcggctcgccggtggcgtatgaccgcatcctggcatcccgcatgggtgcttattctattcagttactgctggaaggttacggcggccgctgtgtcgggatccagaatgaaaaactggttcatcacgatattattgatgcggtaatgaatatgaagcgggtgtttaagaaagactggtatgagaccgcgaagaaactctactaaaaatcctcgtcatccttcagcctgtggccgcgttggcttcattcatcgcccgggtcacatactgatgtatgctccccggactctttattttgccgccttgccacagactgaatgatttagaggattgtgcgaattgtccttcagcctgtggcggtgttggcttcattcatcgcccgggtcacatactgatgtatgctccccggactcttcattttgccgccttgccacagactgaatgattcagaggattgcgtgaattttttaaagataatacctgatgactcaatttgggattgatcagaataaaaagaagcggtttgcacagtaacaggcacaaaaaaagcggcgatttcgccgctttttgctgtccggagtccggagattattttgcggcttttgctgccgctgcggctttgacgatcacggcgaaagcatctgctttcagtgatgcgccgccgactaatgcgccgtcgatatccggctgggtaaacagctctgcggcgtttttatcatttacagaaccgccgtactggataataacctgctctgccactttcgcatctttcttcgcgatatggctgcggataaatttgtgcactgcctgtgcctgcgcaggagtagcggacttgccggtaccgatagcccagattggctcatacgcgatgacggcgccgaggaatgcatccgcaccctgagtgttcagaacggcatcaatctgacgtgcgcagacttcttcggttttacccgcttcattttctgcttcggattcaccgatgcacagtaccggggtcagacccagttttttcaggatcgcgaatttctctgccactaattcatcactctcaccgtggtaagtgcggcgctcggagtggccgataatgatgtattgtgcgccgatgtctttcagcatttcaggggaggtttcaccggtgaacgcaccggagagattcagaccggtatcctgggcacccagtacaatggaggagcccgccagaacctgtttggcctgagagagataaattgccggtggtgcgatcgcaacatcacatccggtgacattgccgatttcatgacgcagagcggtgatcagctcataaaccattttactgctgccgttcagcttccagttacccatgactaagggatgtcgcattgtatttcctcctgccggaatgagttaaatgacttaagctttattaccattgtccgcgcagagcggcgaacaggcaaacagagagacagtatagtgaaagcggcgcgaaatagctttgcttttcggccactgtttactgtgccgtatcactattagatagcgaaagcttaatcggttcaatagcgaaagttaccccatttttatcatcaactaccagaagatagcgtaatgcaccgaattgagaggcgtaagtgccggttttgaaatccgttgccagtgcccggctcagggcggcatcaatattgtttttattgagcgtcggttcgaactgaataatcagtgccttaatataggccagcatcagggctcggttggttttttccgctgcactgtctgcaccgggcagcagtgtcagctggagacttttgattttttcactgtcgcgctcaaggatggcggaagagtaaatataagggctgatgcgggttgccgcccgcagatagctggcggtaatgtcgtttgaggccacgactttgtattcccgtaatggcagcgacgggttgttgcggttaaactgttcgcgcataacggggatggtgatgccgaaagcaggggcatccgcctgaagccagagtgtttccggcgggcaggggatggggatcagtaccgcgtcaccggccgcaaccggggtgacgggcagcagcgtacatcccgctgtcagggcggccagtgcggtttttttgactgcgttcatagcgactccctgtggtccgtctgcaatataaccagtgtacacgattaggaaagagaaatgacactacaacaatgggcgttttcgtttcacgggcggatcggccgcaaagcattctgggcggggatcggcgtgtgcggcgcagtgctgtttctcctgatgtcattacaggggctgtttaagctgcctgttgaagtgattatggtgccggtgctgatggtgatgtatcccgccgccgcgatttttaccaaacgcctgcatgaccgcaacaagcgcggcggctgggcgttaatgctggtgatggcgtgggcactgaccacgccggactggagcctcgccggtgatttctggcagtgggggctggggcgttttctgccgatttttatcgtgatgataatggtgctcgactgcggtgtgtttaaaagtcttgatgagggcaaccgcttcggggagagcacacagccggtggataaaatcgacagccactgaggcagagacagcgggcgaacccgcggtcagggtatcaccagtattgctcgctggtgatatggccgggtttgcggcgcaggtgtttgcgcatctcccgcccagttttcagcagattttgtgtgtctttcaccatctccgggttaccgcacagcatcacatggctgttttcggcggtcagcggtaatccggcggcggcttccagttcaccggaactgatcagcgccggtacccggccatgcagtgagccttccgcatgctcccggctgacgacagtcacgatccgcagtttgtcactcccgatttttttctgcagttcccgcatcagcggcagatagctcaggtcggcggcatagcgcacagcatgcaccagcacaatatgacggaaccgctccagatctttgccatattgcagaatggataaaaacgggccgatggcggtgccggtggagagcatccagagggtgtcgcagtccggtacttcatcaagcacaaaaaaaccggccgcttcatcggtgatcagcagttcatctcccggggtcagggctgccagccgcgggctgagtttaccgtcgccgacagtgaccagataaaattcgaggtcatcatcatccggtgcattaacataagaataagcgcgctgtgtgcgttcgccgtcaatttccaggccgagtttggcgaattgtcccgctgtaaagggaaggacaggtgcctgaacatgcaggctgaataaggtatcagtatggtgtgtgatacgtgtgacacgtcctgtgatccagtttgacatgcataacctccgtcagtcgcagaatggtcgttattaatatgtaaaccagtgtaataagccgacggggaaaaatgtatcgattaaatgcgtcagaggatcctgtcgcatgaatacgataaatcaggatgaactgtacagtttagttgccggaaacagcataaaaacggtcgttctgttacaaaaataaatgtgtgaactatctcccaaaatttttttaatttgctattttatacggtatcgcaagtatgactgattccggccgtgattaatgctgccggaattgtgctgtgccctcccggtgacaatgtaaagactgacaataaaaatgaaaaaactggaaaattttcatctgctggtaatgctgattgcgctgattgctgtcgggcaaatgacgcagacagtgtatgtgcctgtaataacggatattgcgctggatttcggtaaaccggcgggtgccgtgcagagcgtgatggcggcgtatttatttacttatggtgcatcccagcttatttacgggccgatttcagataaagtcggccgccgtccggtgatcctcaccgggttatttatttatgtgttatccacgactgccgcgctgttttcaccgaatctgactatgctggtgattgccagcgggttacaggggctggggaccggggtggccggggtgatggcgcgaaccatgccgcgtgacttatacaccggaatttccctgcgttacgccaacagcctgctgaatatggggatcctggtcagcccgcttatcgccccgatgctcggtggtgcactggcatttttcttcggctggcgtgcctgttatgcgtttctgctcctgctcggtctggcggtgggttacaacatgtggcacaaactgccggaaacccgtccgccgatgaaagagaaacctaaaatgtgggcctctttccgtctgctgctgaccaaccggacatttgtgccgtatctggcgatgctgatatgcggcctggccggggtggcggtatttgaggcatccagcggtgtgctgatgcgtgacggcctggggctgggcagtatggcggtgagtattctgtttattctgccgatacctgcggcatttttcggtgcctggtttgccgggcgtgacagcaaatccttcagttttctggtgtggtgtgcggtaatctgctgtctggtggccggggcgctgatgtggatcccggggctgctgggcgtgatgaatgtctggaccttactgatccctgctgcgctgtttttctttggtgccgggatgctgttcccgctggccaccacggcggccatggagccgttcccgtatctggcgggggctgcgggggcgctggtgggcggattgcagaatgtgggctctggtgttgctacctggatttccgcactgatgccgcagggcggacagggcagtgtcggcctgctgatgctggcggtctctgtgattatggtgttgtgctggctgccgctggctcaccggttgcagaatcagcagccgatggcatcctgagtcaggctgctgatataaagaaaacgggcactattgtgcccgttgttctgtttcgcaacagagtagtgatcactgatgcagtttatgtttttgcagaaactgtatgcctttgtccggaaaatcagtaaataacccttctgctccggcctgaatataaatagcatcaaataactgttcagtgttttccgcatacggcggcaaggcatccgcgcggacagtaaacggatggatcatcagttgcgaagcgtgtgcctcttttgccatcggcgtcagagtgatgtgacccggtttggactccttgctgataagcatatgataatcaggcccgataccatcagcatatgctgcgattttactcatcgcaccgggagccatcatccagtcgtagttatagttgacccatttgccttccgcattctgttcaaatgtttcctgccagtcggtgtaagcgatcagctgtatcagcatcaaatccatcttcatttccggcatcagctcatttttgatgcgctttaattcattcggatcgaaacactgaagaaataccccggaatctttagtctggtagccgtaggctttcagcacttccagggttttacgggtgatatctttaccttcctgacggtggaaccacggcgctttgatttcggggtaaatcccggtatttcttccggtggaatggttcagaccctgaatgaactcaagttcttcctgaaaggtatgaatacggaaatctgattttcccatcggaaaacgacccggatatttttgtacggctttaccattttcgatttcaaacccctcggtaaatttcagggatttaatttccgcgagggtaaaatcgatggcgtagtaacggccatctttacgtgcgcgatccggaaagcgttttgccacatcggtaacacggtcaaggtaatgatcatgcaggacgatgagctcatcatctttggtcatcaccagatcttgttccagataatcagcaccctgtgcatatgccatcgctttggccggcagggtatgctccggcagatagccgctggcaccgcgatgtgcaatcacaatcttattgtctgccgcaaaagcggcagagccgcagatcatggcacccgcaagggcactgacaagataaaactgacggggtatattcatctgtctgtctccgcttatgctttattgcgggcgatttcatcgtgatgtttcttctcaccacgcatcaccacaactaacaggatcacagcgagcacactgccgccaatcatgacaccaaaaccgccatcccagccgaaataatccacagtaaagccgacgattgcacttgctgccacagaaccgccgagatagccgaataatccggtgaatccggcggcggtaccggctgcttttttcggtgccagttccagggcatgaaggccgataagcatgaccgggccgtaaatcaggaagccgatggtgatcatacacgccatatcaacagacgggttacccgccgggttgagccagaagaccacggtggcaatcgtcaccagcgtcataaagaacactccggttgcgccgcggtttcctttgaagattttatctgacatccagccgcacagcagcgtacccgggatccccgcccattcatacaggaaataggcgacagaatagcctgttatatcgaaatgtttgacttcccggagataggtcggtgaccagtcgagcacgccgtaacgcagcagataaacaaagacgttagcaacagcgatataccacagtaacttattcggcaaaatgtattgcatgaagatctgttttgccgtcagttcaacttcactgttctctgtatagtcatcaggatagtcgtttttgtactcttcgattggcggtaagccgcaggattgcggggtatcccgcatcagggcaaatgcgatgagtgccaccagaatggccgcaaatgccggcatgtaaaacgccgctttccagtcaccgaaccaatacatccccagcagcatcagcatcggcggtaagccgccgccgacgttatgggcacagttccagattgatacaattccgccgcgctctttctgtgaccaccagtgcaccatagtacgtccgcacggaggccagcccatcccctggaaccatccgcagagaaacagcagaatagccataatccagacggaagaggttgcccagtcgcaaaagcccatgataagcatgacagccgaggcaaggataagcccggtcgggagaaaatagcgcgggttagcccggtcagaaaacgatcccatgataaatttggaaagaccataagcaatggagatcgcagacaatgccgtccccagttcgcctttggaaaatccctgctccatcaggctggggaaggcgagggcgaaatttttccggaccagataataggcagcatagccaaaaaagatacctataaaaatttgccagcgcagacggcggtataccggatcaatgcgatcagcactgagcctctgaatgtgcggtgcaggtttaaacaggcttagcatagacatctccctcgctaagtatttgtcagtatttggtggtgaagtttaccggaacagcagcggttttcttcatatattttccttttcgctcacagaatattcgatttaattcgttattactgtgaatgtcagcacatacggttacatactgattacagttggttgttttttgtgatctctgacgggtatccgggagtttggtctgcggatatgtgcttttaccgggtgaggcgggtttttgttctggtggtgattgttgttttcgcgcataaaaaaccgccggtattaaccggcggcagagagataaaaaacagaaaggggattagctgtgatcttcccagtcctgtgtgcgggcaacggcttttttccagccgctgtagcggacattccgttccgtggtttcaatgcccggacggaaggttttctcgatggtggatttggctttgatttcctctaaatcctgccagaacccggtggataacccggccagcagtgccgcacccagtgcagtactttcgcggatcagcgggcgttccacggatgtccccaggatatcggactggaactgcatcaggaaattgtttgccaccgcaccgccatcgacacgcagcgccttcagacgggttccggcatcggcctgcatggcttccagcacgtcgcgggtctgataggcgatagattccagggtggcacggatcaggtgattgctgttcacaccccgggtcagaccgaaaatagcaccgcgcgcatacggatcccagtaaggtgcgcccaggccggtaaaggcaggcaccacatacacaccgttgctgtctttgactttggtggcgaaatattcggaatcggtggcatcggcaatgattttcatctcatcgcgcagccactggatggaggcaccggccacaaataccgcgccttcaagggcataattcacttcaccgcgcgggccgcaggcgatagtggtcagaagaccgtgttcggacagtaccgcttcgttaccggtgttcatcagcaggaagcagccggtgccgtaggtgtttttcgccatacccggctgaacacacatctggccgaacagcgccgcctgctggtcaccggcgataccggagataggaatacgggtgccgcctttcccgccgatattggttttgccgtagatttcagaggacgctttcacttccggcagcatggcgcgcggaataccgaacaggtcgaggattttctgatcccactccagtgaacggatgttatacagcatggtgcgcgaggcgttggtgtgatcggtgacatgtacacgtccctgggtcatgcgccagaccagccaggtatcgacagtcccgaacagtagttctcctttctccgccttctcccgcgcaccttcgacattgtcgaggatccacttcactttggtgcaggagaaatacgggtcaatcaccaggccggtattttcccggatatagcggaccatctcttcattctgtttgagaccggtgcagtaatctgctgtccggcggcactgccagacaatcgcattataaaccggtttgccggtctctttttcccagacgatggtggtttcgcgctggttggtgataccgatagctgcgacttcgtccggatgcacgtcagttttggcgaggacttctgttaagactgagctctgtgtggcccagatttccatcgggtcatgttccacccagcccggtttcgggtagatttgagtgaattcgcgctgcgcgatatcgataatattggcattacgatcaaaaagtaccgcccgtgaactggtggttccctgatccagcgcgacgatatactttttctcacgggtgattgtttctgttgtcataattaaacctgttttatttctgagtgaacaaacacgcgataacgtcagagtacgtgattcgctgcggtattatttttcgtccccggtattacacacttcgcacggcagatggcggccgatcagcttgcggtaaccgaatgcaccgagtaacccgccgacgatcggcgcaaacatcggtaccaggaaatacgggatatcacgcccgccggtgaaggcaatatctccccagcctgcaaggtatgcaaccactttcgggccgaagtcacgggcagggttaagggcgaagccggtcagcggaccgaaggagccgccgataaccgcaatcagcagaccaatcagcagtggtgccagcgggccgcgcggtacaccgttgccgtcatcggtcagtgccaggataagacagacgaggatagcggcgatcaccacttcgataaagaacgcctgacccacgctgaccggtgctgccggataggtggagaaaaccccggcggtaaagaggctttcctgtgagccgcggacaatatgatgcacctggtcataatcgaggaacacattgtaatacatggcataaaccagcgctgcagcggcaaacccgccgaggaactgggccacaatatacggaatcactttgcggcgctcaaagcaggcaaacagccagagcgcgagtgtgacagccgggttaagatgtgcgccggagatcccggctgtcagatacaccgccagtgccacacccagaccccagatgatactgatttcccataatcccagttgtgcaccggcgatacgaaccgcggccacacagcctaaaccaaagaagaccagcagtgctgtacccaggaattcggagagacattgtccgaagagggtcggagatttcattagactcatagtatcaatcctgatagtgcaaaattagggtgaaataagtgcaaattattaacaaataatgttcttcgtgtatcagacgtatgtcttagtgtgaatttatcgttaatgagcggaaacgagaaataacgaaatcaaaaactgtggatctcgtcaacaaattgagcgatttcgcttattttataacaagcgagcaacattcaggcgaatatcagccggattttattctgctgcattatggggaatacacgggatgtgactggacacattgataacacctacttacaatcagagcatcgcttacaaggaggacgcaagatgtcatttgaagtatttgaaaagctggaagcaaaagtccagcaggctatcgacaccatcaccctgttacagatggaaatcgacgaattaaaagaaacgaacaacaacctgaaccgcgaagtgcagaatgcagccggtgcccgtgagtcactggtgcgtgaaaacgagcagctgaagcaggagcaggcaggctggcaggagcgtctgcgggctttgctgggtaagatggacgacgtccagtaaattacacgtcatccttcgttccgcagcggcgttggcttcgttcgtccgccccggtcacatactgatgtatgctcccggggacgtcctcacttcgccgccttgctgcaaaacgaatgatttagtgtaatcgcggtattgctgcaaaacgaataattgagtgtgatgcggtttttatcttgtgtcataacgacaaaagggcggatatccgccctttttgttgtctgtgtatcttatgaggattacgcttcggtcagctcatcttcatcatcatcattttcttccggaagcgtcagcgggatatctgacaggataatcccggtgttatccgcatacagataatcgccggagaagaaggtcacaccgccgaaattcacgcggatgtcactgtcaccgataccttctgaaccacagcctgccggaattgcggccatcgcctggataccgatatccatttcagccagatcatccacctgacgcaccgcgccgtacaccacaataccttcccagccgttctgcacagccagtgccgcgagttccgcgtcaaccagtgcacgacggacagatccgcccccgtcaacgaggagaatacggccctctccctcttcttccaggagatcaaagagcagtccgttatcttcaaagcattttacggtggtgatttgccccgcaaacgatgaacaacccccgaagttggaaaacaggggttcaacgacattcacattttcctggtaaatgtcacaaagctcggaggtgtcgaaggtatcatttttcataggattttacgtctggttgctgccggatacagtcagtatagccccttcacacggttgtttgcaaaatcaacagcggccgctttccgatctgaatcaagaaagcggcagatttcggcgtaaattctggttacagacgctggcagataagtcctgcggaaaacaggatattgaccagaagtgcggctttcaccatctgttccagcagcgggcgcattccggtggcggtcatatcccccagcacgcgtctgatatgcataaacagtaccggtgcagagagcaggaacagccagctgtaccagccgtgcagatagagaagggtaaagagcaccaggcacaggaatgccacggtaatcacggtggcatggtaatagcgggatttcagcgggccgaggcggacggccagggtgtttttcccggccaggatatcattttcgatatcgcgcatattattgatattcagcactgcaacagacagcagtccgcaggcggtcgccggcagaatggtcagcggactgaaaaaaccggcctgcaggtaataggtgcctatcacactcagccagccgaaaaagatcagaacagaaatatcacccagtccgaggtagccgtagggttttttcccgactgtataggtgattgcggcgataatcgcggccacacctaaccccaggaagccgataatatcttccggtttctcacaggcgacaataatcagggccagcccggacagacaggcgagggtgacggtcagaatcagcgcctttttcatctgagcggcggtgataacacctttctgcataccgcgcagcggcccgaggcgtgcttcggtatcggtgccttttaccgcatcgccgtagtcattggccagattcgacaaaatctgcagaatgccggtggtgataagggcgagcagggcaacagggaatttaaagtggccggtccagtaagccagagcggaaccggtaataatcgcgatcaccccgagaggtaatgttttgggccgcaggctttccagccaggcttgggtacggctgatggccggtgaaggggtgactgacattgaaactcgcttacttttcagaatgaaataataacgacaaaaataataacgcagactgccgggcagattatacccgtacagtctgaatactattatgtctgattattatcaaattacagaataaagcgacttaaatcttcatccgccacgagctgatccagatgatctttcacatattccgcattgatctcaatggattgaccctgtttttcactggcatcgtaggaaatttcttccattaatcgttccagcaccgtatgtaaacgacgggcaccgatattttcggtggtttcgttgacctgccatgcagattcagcaattttacggatgccgtcggctgtaaaggtgatatccacaccttcggtggccatcagtgctttgtactgaacggtcagtgaggcgttaggttcggtcagaatgcgctcgaaatcttccgtggtcagtgcctgtaattccacacggataggcagacggccctgtaattccgggatcaggtcagacgggctggaaacctggaacgcaccggaggcgataaacaggatgtggtcggttttgaccatgccgtgcttggtggagacagtacagccttcaatcagcggcagcaggtcacgctgaaccccttcgcgggacacatccggcccggaggactggccgccgcgcttacagattttatcgaactcatcgataaacacgataccgtgctgttcaaccgcttcaatggcctgctctttcagctcttccggattgaccagtttggcggcttcttcctcaaccagcagtttgaaggcttcttttatcttcattttgcgtggtttttgtttttgtccggccaggttctggaacatggactgtaactggctggtcatctcttccatgcccggaggtgccatgatttccacacccattggtgcggcagagacttcaatttcaatgtctttgtcatccagctggccttcgcgcagttttttgcggaatgcctggcgggcagctgacggctctgcctgggtatcagtctgaccccagttattttttgccggcgggatcagcacatcgagaatgcgttcttcggccatttcctcagcacggaaacggtttttctcgatagactgcaggcgcaccattttcacagcggaatcagtcagatcacggatgatggaatccacttctttaccgacataaccgacttcggtgaatttagtggcttcgactttgataaacggcgcattggccagtttggcaagacgacgggcaatttcggttttaccgacaccggtcgggccaatcatcagaatatttttcggggtgacttcgtgacgcagctcctcattgagctgcatacggcgccagcggttacgcagcgcgatggcaacagcacgtttggctttatcctggccgataatatggttatcgagttcgctgacaatttcgcgtggagtcatttcggacataacgtcgatccttatgcttttgaaggtaattcttcaaaattcagattgtggttggtgtagatacagatatcaccggcaatagtcagtgcgcgctccgcgatttcacgggcactcagatcggtggtttccagcatggcgcgggctgctgcctgggcgtacgggccgccggaaccaatggcaatcagatcattttcaggctgaacgacatccccctggccggtgataatcagcgatgcggtttcatcggcaacggccagcagggcttccagtttgcgcagcatgcggtcggtacgccagtctttggcgagctcaacggcggcttttgtcaggtgtccctgatggagttcaagtttgcgttcaaacagttcgaagagggtaaaggcatccgcggtgccgccggcgaaaccggcaatgactttgtcgtgatagaggcggcggactttgcggacattacctttcatgacggtattacccattgtcgcctgcccatcaccaccaattacgacctggccattacggcgaacacttacgattgttgtcatgagtcagcccctggttgtgctaaaggatggagagaggccgccgggtatattcccggcggcacagaattaactagagatatggggggagggctgaaggatttcaacccccggcggagcgaagaatacaatttgttacgccggcatcagcggcacggcttttcaccgactgcgcggcggatttctcatacgggccaagcatcacacgataccagccgccgccctgggacacccggctttcgataccggagaaggcgagaccggcgcgaacttcttctgcctgaccactctcacggaatgatccgcactggattaaccagcgctcaggcgcagcctgtggtttttcctgcaccggttttggtttctcagccggtttttcggccggctgcggtgccggacgggtttccggctgcatacgcagctgcggatcctggccggtaaccacgacctgagagcgcggaaccgtgccgtttgccggtacttcctgtaactgaaccggtgcctgctgcatatcagactgcatctgctccagcagctgccgctgttcctgggtcagtttggcattcggatcaatgcggttggccggtgcctgcgggttggagtaatactgctccggtaccccggcttcgcggttttccagctctttgatataacgccagcgctcctccgggatcggcgggagcccgttaccggtactctgctgatgcgcaggcggaatgatgctgtcagaagcggtctgactttttttgttatggaccagatagaacaggccgccgacaaaaacgaccaccagtgccacggcgatcaccaatgtggtgaacggcaggcctttcgcctgacttttcttccgtgatttactttttttacgcggcgcagagcgtccgcgtcccacataatctcgttgtgccactgtttcaattcactaatgagtcggttaagggaacatattattcagcgttacatgttacttaaccttatggattttgcctagcttttaggcgcgcaggcactttctctgatgattaaatcagaatccagcaggcgcgaaccttttgccacggtgtgtccctgcaactgttccagcagcagtaagaaagactgacggccgatttcataacggggctgtgcgatagtcgtcagggtcggcgaacagtattgtgcggccggtaaatcatcgaaaccgacaaccgagagatcctgcggcagtgtcagcccctgttttctggccgcccagagaacgccgatcgccataatatcgttgtggcagaaaatcgcggtcggcggttccggcagtgccagcagctgtgcggcacattccgcgccgctttcgtgggtgaaatccccgcgcaccagatactcgtcccgtaccggcattcccatacggcgcatggcctgaatatacccttcgacacggtactgacacaacggcagctcttccggcccggaaatacaggcgatgcgggtgtgtccgagtgactgtaagtaatgggtggcattaaaggcggcggtcaggttatcaatattcaccgtcggcagctccagctccggggcaaattcgttagccatcaccatcggcgggaagtggcgctgttcatcatggcggctgtcaaacggcacatcggagccaagcagcaccatgccgtcaatttgtttggtgacaatcagattcacaaaagtgtgttccggcttgtgctgataacggcagtcaccgatcagaaccagatagccgtgtttggcagcaatttcctcgataccaacaataatatcggtaaaaaacggatcaccgatatccggcacaatcaccagaatggtgcgggattcattacgtttcatcccccgggacagattatgcgggtaataccccacttccaggacagcattttccactttctgccgtgtctgcacagacactttctccggattcatcagtgtccgcgacacggtcgcggttgagacgcctgcggctctggcgacatctttcattgtcgcgccggtatcgttgcggcgtggttccatcattaattcctttggttaccctgtaagtgtatcgattgcgcggtttttgtgatcattatggtccgctgtacttttcacatgcctgtgaaaaaccgcctgagcttcttaagtgaaattcagacggtttattaatcgttctattaacggctattctaagccctttgtaaaattaatctgttacctggtttgcataaaactgtgagttatctcaattttttgagacaacgcgcactttccgtgagacgtcagtctcagccgtcggtcggatcgacatccacattccagcggactttccggctttccggcatctgctgaatatacggaatggcctgcgcgacaattttctgcagctgactgcgggacggatgctgtaacagcaactgccagcggaaacgtccgccgcgtttggcctggatagctggcagcggccccatcagccagaaatgctcatcccgcagcggatgggattcgaataactggcgtaccgtctgcaggaatgcattcgcccgctggttattctgatcttcggcgcggatcatcacctggctggtataaggcggcagacagacactctgccgctcattcagtgcctgtgcggcgaaggcggcatagcctttttccagcagcacggtcagcagcggatgttccggatggtgagtctgcaaaatgacctcgccgcgtttcccggcgcgtcccgccctgccggagacctgggtgtagagctgtgcaaagcgctctgccgcacggaaatcaccggagaacagcgcgccgtcgacatccagcagtgccacaagggtgacatccggaaagtgatgccctttggccagcatctgggtaccgatcaggatgcgtgcgccgccctgatgcacatccgccagatgctgctccagctcgcctttgcggctggtggtatcgcgatccagccgcgtgaccggaacatccgggaacagcggggtgatgctctcctccagctgttcggtgcccagcccgaccggcaccagctgtgtggagccgcactgcgggcactgtttcggtaccgggcgctggctgtcacactgatggcagcgcagcatgcggtggttctggtgcagagtataaaaatggtcgcagcgcgggcattccgctatccagccgcactcgtggcacagcattgccggggcaaagccgcgccggttgaggaacagaataacctgattatctgcggccagatggtggcggatgcgtttgatcagcggttgtgacaacccggaagtcagcggcagccctttcaggtcgagcagatgctggtcggcaagctgtgcatttcccgcccgctgtgtcagcggcaggactttgtattttttctgccggacattaaacagggtttccagtgacggggtcgccgtgcccatcacaatcggaatatcatttttcttggcacggaacacggccagatcacgggcgtgataacgccagccgtcctgctgtttataggagccgtcgtgctcctcatcgataataatgatgccgagagaggtaaacggcgtgaacagcgcggagcgggtaccgataacaatggcggtctccccgcgctttgcccgcagccagacagccagacgctcgctgtcattcatgccggaatggagaatatccaccggcgcctgaaaacgggcgcggaagcgggcgatggtctggggggtcaggccgatttccggtaccagaaccagggcctggcggccttcggccagcacattttccagcacactgagatacacctcggttttcccggagccggtgacgccgtccagcagccagggagaaaactgatgctgctctgcgcggatcgcccccacagcggtggcctgctcggtattgagtttcaggcgttcgccggtgacggcaaatcccggctgccagggtttgctctccggctgcacatcgttcagggtgatcaggtttttctttttcagtccctgcaatgcactgtcgctgagttcatattccggagtctgatggcggtaaaccggctggcggcgcagacaggccagtgcctgctgctgtttcggggagcgtttgagggtatggatatcaatctcacgtccttccggcgtcacttcccagcaccacagcggtgcaaaggcggcttctttgccctgacgcagcaaaatcggcatggcatgaaacagcacttcccctaacggatagtgataatactgcgccgcccagttcagcagcggccacagatccccgggaaacagcgtgtcatcatccgggcaggcaatgaccggcttgagtttctccgggctgaaggtgctggtttccgccagttcagccacaatgccgactgcctgtttctgtcgtccgaacggcacaatcacccgtgcccccggtaccgggcggggcatatcatcaggcagtaaatagtcaaatgtttgtgtcagaggtactggtaatatcacccggacgactgtcattataatgtccatcatcggcagagcgccggcgtgtaaaaaatacacagcggcggaaaaggcgcaaaagtgtctgaataatcaccggatttcagtttttccccggtaaaaacagggaaattatccgcaaaacaggatccagaataccacgaaaagacagcggatttcattgcatggttcagggaatttctgtatgatccgccgcctttggtaattaaaataccaccgataacttatcatcaacacgacgtgtggtgtccggcaaaaaggcccggatagcgacacggccttaaccgaggttttcccatgaaaaaaggtattcatcctaactacgcagaaatcactgcaacctgctcttgcggcaacgtaatgaaaattaactctaccgcaggtcacaacctgaacctggacgtgtgcggcgaatgccacccgttctacaccggtaaacagcgtgacgttgcaagcggcggccgtgttgatcgcttcaacaaacgcttcagcgttccttctgcgaagaaataatggcactgcgcggcatgccgcgctctgttccataaaaaacgccctgaatgaaaatatttcacagggcgtttttttatgtctgtttccgggttgagaagtcgtataacacgcggataaaactcaatattcccacgtatccgggtcgaccccatgctggcgcataatttctttcgccacttccgggatttcatcactgcgttctttgcgcagatcatcatcatcgggcagtggctgtccggtaaaagcatgcagaaatgcttcacataacagttcgctattggtggcatgacgcaggttattcacctggcggcgtgtgcgctcatccgttaaaattttaagcactttcaacgggatagaaactgtaatcttctttacctgctcactttttttgccatgctcagcataagggctgatatattcgccgttccattcagccatggattaccttgttatcttagtcagtttgaggaggagccgggcacagaaaagtacctgactgatatcggtattatcccacttgtatatataaccgtaaagcaggatggatgtccagacatattgacgtctaaatgaaccgcggatatgctgataactcgttcagttactgatagggaaagaggtatggcacgcaaacccgcgacagcggcaattcataacggactcaatgaagagacccaattcggctgtgtcataccgccggtgtatctctcatcaacctataattttccggccttcaacagcccgcgtgaacatgattattcacggcgcggcaatcccgggcgggatatcaccgggcgcacgctggcggagctggaaggcggtgccggggcggtggtgaccagcagcgggatgtctgctctgcatctgctgtttaccgtgtttttatcacccggggatgtgattgttgccccgcacgactgctacggcggcacttaccggctgctcgacagttgtcagcagcgcggccattttaccgtccgctttgcggatatgaatgatgaggcgtcactcagtgccgcgctggcggagaaaccgaagctggtgctgattgaaacgccgggtaacccgctgctgcgtatcacggatatcgcggcagtcagtgagaaggcgcatcaggccggagcactggtggcggcggataacacgtttctcagcccggtattacagcagccgctggcactgggcgcggattttgttattcattcctgtaccaaatacctgaacgggcattccgatgtggtcgccggtgtggtgatcgccgcagatgcggaacattgtgaaactctggcgtggtgggcgaataatatcggtgtgacgctgggggcgtttgacagctatctgctgctgcgcggtatccgcaccctgatcccgaggatcaccttacaggaaaaaaatgcccgtactctggcggattatctggtgcgccagccgctggtgaaaaaagtgtattatccgggactggcgacgcatcccgggcatgaactggccgcaaagcagcagaaaggattcggcgcaatgctcagttttgacattaatggtgatgaagctgcaatttcccgctttttatctcacctgtctctctttacactagcagagtcattgggcggggtggaaacgctgatttcccatgccgcgaccatgacacacgcgggaatgccggagcaggcacggcatgcagcgggaatttcagacagcttattacgtatttctgcggggattgaggacagcagtgatttgattgctgatctggatcgcgcatttcagtcagtgactaaggggtaagggtaatcatgagtgcgttggcgattgatgaatcagtaaaagggcgtcagttacataaattcggcggcagcagcctggcagatgcaaaatgttatctgcgggtggcgaatattatggcgaactacagtgagccggatgacctgatggtcgtgtctgccgccggcagcaccaccaaccagctgattaactgggtcaaactgagtcagagtgatcgtgctgccgcagaacaggcgcggcagaccctgcaacgctatcagacaacccttatcagtgacttactgccggaagttcaggccaatgtcctgatctttcagtttaatgatgatattcagcgcctggcgaaactgctggaaaatccgctgaatgatgtgatttacgcggaagtgaccggccacggggaaatctggtctgcccgtctgatggctcaggtacttcaggagcagggtatggccgcacagtggctggatgcccggacattcctgtgtgcggagcgggcggcgcagccggaagtggataccgcgcggtcgcagccgctgcttgcagaactgctggcgctgcatccgggtaaacgtctggtggtgaccgggtttatctcccgcaacgctgccggggaaaccgtgctgctcggccgtaacggcagtgactattccgccacccaggtcggcgcgctggccggggtgaaaaaagtcaccatctggagtgatgtcgcgggggtttacagctctgacccgcgcaaagtcaaagatgcctgtctgctgccgctgctgcgtctggatgaagccagtgaactggcacgtctcgccgcaccggtactgcatacccgcacattacagccggtgtccgtcagtgatatcgatttacagctgcgctgcagttaccagccggaacagggctcgacaaaaattgagcgtgtgctggcatccggcaccggggcgaagatcgtgaccaaccatgatgaggtttgtctgattgatatccgcctgccggccggggatgacgccagagcgcgttataaaagtattgatctgctgcttaaacgcagccagatccgcccgctggcggtcggcctgcataatgatgacaatcttattcagctcagttataccgccgaagtggcagacagcgccctgcatgtgctggaaagcgccggactgccgggcacactgacactgcgtgacggcttctcgctggtggcgctggtcggggcgggggtctgtaaaaacctcctgcattaccaccgtttttatcagcagctcaaagatcagccggtggagtttatctggcaggccgaggacggtatcagtctcgtggccattctgcgcacccgtcagaccgggcatgtgattcagggtctgcaccagagcctgttccgtgcggaaaagcagatcggcctgatggtgttcggcaaaggcaatatcggcagccgctggctggaactgtttgcgcgtgagcagagtaatctctctgcccgcagcgggtttgaatttgttctcgccggggtggcggacagcgaaagagcgctgctcagttacgacgggctggatccgagccgcgcactggctttcttcaatgaggaagcagagccgatcgccgatgaggacaccctgtatctgtggatgcgcaaccatccgtttgatgacctggtgattatcgacctgactgccagtcaaaccctggcggaaagctacgccgattttgccgcgtacggtttccatgtcatcagcgccaacaaaattgccggggcggcaaaaacccgcgattaccgccagatccgcgatgcgttccgcaaaaccgggcgtcactggctgtacaacgccactgtcggtgcgggactgccgatcaaccactgtgtgcgtgatctgcatgaaagcggagacagcattattgcgatcagcgggatcttctccggcacactttcctggctgttcctgcaattcgacggcaccgtaccgtttagtgagctggtggaacaggcctggcagcaggggctgaccgagccggatccgcgtattgatttatccggccaggatgtgatgcgcaagctgattatcctcgcccgtgaagccgggtatgaaattgagccggaagatgtccgtgtggaatccctggtgccggaagcggcacaggaaggcacaccggatcacttcttcgagaatgtcactgcgctgaatgaacagatggcctgccgcctggaagctgcccgtgaaatgggcatggtgctgcgctacgtggcccgttttgatgccaacggcaaagcgcgggtcggggtggaagcggtccggcctgatcatccgctggccgcattgcagccgggggataatctctttgccgtggaaagccgctggtaccgcgataatccgctggtgatccgcgggccgggtgccggtcgtgatgtcaccgcaggggcgattcagtcagatttaaaccgtctggcacaattgctgtaattcatcggattctgactatcgccggggttaaatagtcttaaaaagtcactatacgggacaaaaaatgacgataacgggaattgtcttattacgtttatagtacagggttggtataaatagcgcatggtgatgtttcaagatggacatataattattatggatgatggctgtgacaggatgtcatggtaaggatatgcaccggacgtgcttcttctgacaggaagccaggctaaggacagaaacaatcccggcgggatgcgattaacggatttaattgcatcccgttactattttcacttcccgctgtttttctgctgacggtttcccgttacactttcctgctgaatttttccccgccggactgaggattttcgctcaggctgaatcgttactatttttgccttaattcgcgatatctgtctgtgacgtttgtttttccctttcattatgctggcgggacggatttttacccgataatccggcacctgcctgtgcgcaacatgatggcggcacggtaattaaatctgataaagtcctttcaaagcgcgttttttttgatatgaatatagggcagagataaatgcaagggaacggcgtcacaaaataagaattaatccgtcgtatgaaatcactaagatgtacaggacagagaactgccggctgaaagttcctcaccggcggtcataggattctgccgtcaataagggtcaggggtcgtatgaatcaacaatattccgcaatgcgcagtaacgtcagtatgctcgggaaactactcggagacacgatcaaagaggcccagggtgaacatattctcgagaaagtagaatccatccgtaagttatccaaagcgtcacaggccggtaatgaaattcagcggcagaagctgctgatgacactgcaaaatctatccaatgaagaactgctgccggttgcccgcgcatttaaccagttcctgaatttaaccaacgtggcggagcagtatcacagcatttcgccgcacggtgaggcggccagtaatccggttgccctggcggcgctgtttgatcagctgaaagccaaaaattttaccaatgaagagatgcgcaaggccgtggatgaactctccattgagctggtgctgaccgcgcatccgaccgaaattgcccgccgtaccctgatccacaaactggtggcggtgaatacctgcctggcacagctggatcatgatgacttggctgattatgagcacgatcgtattatgcgccgtctgcgccaactggtggcacaggcctggcatactgatgaaatccgcaaagaccgtccgacaccgcttgatgaagcgaagtggggctttgccgtggtggaaaacagtctgtgggaaggggttccggcgttcctgcgcgagtttaatgagcagctcgaggcatcactggattacaacctgtccgtggaagccacaccgatccgctttacctcatggatgggtggtgaccgcgacggtaacccgaatgtcacggcagatatcacccggcgcgtgctgaccctcagccgctggaaggctgctgatcttttctataatgatattcaggtgctggtctccgagctctccatgagcgaatgcacgccggagctgcgtgagcgcgtgggtgaggatgccgccgagccgtaccgcgtcatcaccaaacagctgcgcgcccgtctgaaaagcacactggactatctggagcgctgcctggccggtgaaccggctatcaaaccggataacctgctgaccgataacgaagagttatgggagccgctgtatctctgctaccgctcgctggttgagtgcggcatgaagattattgccaacggccaactgctggatacgctgcgccgtatccgctgcttcggtctgcagctggtgcgtattgatgtgcgccaggaaagtacccgtcataccgaagcgctgtctgaactgacacagtatctcggcctcggggattacgccgcctggccggaagaggaaaaacaggaattcctgctgcgtgaactccagtcaaaacgtccgctggtgccgcagaactgggagtgcagtaatgaaacccgcgaagtttttgatacctgccgggtgattgccgaatcaccggaaaattctgtcgcttcctatgtgatttcgatggcaaaagtgccgtcggatgttctggcggtcaaactgctgctcaaagaatccggcagcccggtcacattgccggtcgcgccgctgtttgaaaccctcgatgaccttaataacgcagagagtgttatcacccgcctgctgagtatcgactggtaccgcaatctgattaatgaccgccagatggtgatgatcggttactccgactctgccaaagacgccggggtaatggcggcgtcctgggcacaataccgcgctcaggatgcactgattaaagtctgcgcccgtgaaggcgtgacactgacgctgttccacggacgcgggggcaccatcggccgcggcggtgcaccggcacacgccgcactgctctcacagccgccgggaagcctgaaaggcggcctgcgtgtgacagagcagggtgagatgatccgctttaaatttggtctgccgcaggtcactatcagcagcctggcgatgtacgccagcgccagcctggaagccaatctgctgccgccgccggagccgaaaccggagtgggccgcgattatggatcgcctctctgatatctcctgtgagatgtaccgcgactatgtccgcgaacagccggattttgtcccgtatttccgcgcggccacgccggagcaggagctgggtaaactgccgctgggatcccgtccggcaaaacgccgtccgaccggtggtgtggaaacgcttcgtgcgattccgtggatttttgcctggtcgcaaaaccgtctgatgctgccggcctggctgggtgcgggtgcggcactgaaaaccgccgtggatgaaggcaaccgggcaatgctggaagtgatgtattaccagtggccattcttcagaacccgcatcggtatgctggaaatggtgtttgccaaagtcgatttatggctggcggaatactatgaccagcgcctggtggagccgcgcctgtggccgctgggggcaaaactgcgcgaacagttatcacaggatattaagagtgtcctgatgatttccaaagatgagcagttaatggcggatctgccgtggattgcggaatctatcgctctgcgtaacgtgtacaccgacccactgaacgtcctgcaggccgaactgctgcaccgctcacgtgaatgcgatcagtcagatccgcaggtagagcaggccctgatggtgactattgcaggcattgcggcaggtatgcgtaataccggttaataacgttatttttacaatcactgacggtcgctgccaacccctgcgggttggccggcggccccggatggccgcagttgcggccattttttattcagggatgcaaatgtgttctcagaaaattgtaagcatgcataccgggttgtatcaatgaacctgctgtctggttagtgatgccgcaaactttcgctttcagagggctttgcgggtggaatacccggctttttcctgcatgactgttattaccctcctgtaccggtgagattttttttgtgtatcctttaaccgggcaacctgttttattagccagcatctgtgcattcgaaatcgcgcctcctgcagccccgtagcaactaacaaaattaattggtgaatttcctgtggctttaattgtttttgccagatgatctgctgcttttttgcctgacataaccttgccattatccagccggacattacatggcgcaccatgtaaccgaatttgaagcatcaattatttccttattattcatgagataattaaatatttatcttaccgtatatgccataaattaattgcagaaaacggcagtttgccggagatatctcaaaataatggcgggaatatatgaataatgatattgaataatctgtaaatttatataatattaaaatatatattgtatgtaactgttactctcactaaggatcggaaatgtcatattacaaagatgtcactaaagaaatcgccgtaaacatgcaggaactgggtaaatttatcccggatgttatgaccgctttctcagagctggtcagcagcagctcggcggatggtgtattagataaaaaaacaaaagaactgatttttatcgcggttgcggtggcaaaccgttgtgatggttgtattggttttcataccaaaaaattggttgatgcgggggtaacggagcaggagctggcggaagcactgggtgtggctgttgctatgggtggcggtccgtctgtgatgtacgcggcaaatacgattaaggcatttaaagagttttcataaacgccttacctttcgctgtgacggatgctcacgatccggcgacatactgatgtatgtgcccggatcgtgataaattatgccacgcaggcggccgggcggacacccagagtatggcagatagcgtaagtcagttccgcgcggttcagggtgtaaaaatggaaatctttcacgccttcacggctgagcagtttcaccatctccattgccacggaagccccgaccagcttgcgggattccgggtcatcatccaggccttcaaacatggtgccgagccagcccgggatgcggacgttagtcattcctgcaaagcgctgtaactgtttgaagttagagaccggaagaatgcccggcacaatctccacatcaataccggccgccgcacagcggtcacggaaacgcagataggtgctgacatcaaagaaaaactgcgtgatagcgcggtctgcaccggcatcaattttctttttcaggttaatcaggtctgactgcgcactgcgcgcttccggatgcacttccgggtaagcggcgacggaaatatcaaaatcggcgaccgattttaacaaaccgaccaggtcagcggcatacatatccggtttgctgctgctgtccggcagatcgccgcgcagcgccacaatatggcggataccgttatcccagtaatctctggcgatagttttcagctcatcacgggtggcatcaatacaggtcaggtgcggaacagcaatcagcccggttttctctttgatacttttaatcaccgaatgggtgcggtcccgctcgccggagttcgccccgtaagtgacggaaacaaatttcggcttcagcacactgagacgttcgatggactgccacagggttttttccatttccggtgtgcccggcggaaagaattcaaaagatacggccacacgaccggccagttctgccaggttctgattcagtgcttcgtgctggtctatatgtaaaaaactcatcgctgcccccgcagttatccgtccgtgattatttgaatgtctatacgtttagacgtctggatgtagattacgggatgaattggttaaacgtcaaccactaattgtcacagtgcgggtgaggttttctcacacgctgtatgaaagattgtcatgatgaggggaaaagcgcggacagacgggctgtccgctgagaagaattattcgggggttttacagcagaaatgggtgacaagctgggtcagcagttcacgggtcggctcaataaagtgggtttcgagaaattcatccggctgatgcgcctgttcaatcgacccggggccgagcaccagggtcgggcacagatcctgaataaacggtgcttcggtgcagtaattcaccgtctgcgctttttcgccgagcaggttttcaatcacaccgaccattttatgatctgtcgggcaggcgtaacccgggatcggcgcatgcagctcctcaatcgccagccgtcccggccagcgctgcttcaccggctccagcgtggtattgagcatgtcgtcaatatcactgagagtcatgcccggcagcggccggatatccatatgcaattcacagcagccgcagatacggtttgccgcatcaccgccgtgaatatgaccgaaattcatggtcggatacggaatgacaaacgccgggttattgaatttttctttcagctcgttacgcagtgacatcaggtgcgtgatggattcattcatcagctcaatcgcattgacgccgcgctccggatcactggaatgaccggactgaccggtaatgcggatagcattggagaggtggcctttgtgcgcccgcaccggctgtaacgacgtgggttcgccgataatggcaaaggacgggcggatagctgcattggcggcaaaatagcgcgccccggccatggtggtttcttcatctgcggtggcgaggatatagagcgggtgctgcaaatccttcacactgatatcgcgcagcgcgtcgaggataaaggcgaaaaagcccttcatatccgctgttcccagcccgtacagcttgttgttctgctctgtcagggtgaagggatctttgctccagcggccttcatcaaacgggacggtatcggtgtggccgcacagcagcagaccgccgtcgccatccccgagactcgcgagcagattgaacttgccgcgcgtttccggaacgggttgcacctcgacatcaaaccccagggtttcaaaccaggtcgccagcagattgataacagtttcattgctctgatcagattccgcttccgtggaactgatggaaggtgccgcgatgagctgacgataaatctcaataaatgcaggtaatttaatattcactgttgacagcctttagtcataatagtatcaatattcatgcagtttatgtgaataaaaatacattgtttgtgtttcaggtacaaggtgaagataacttatgttgaaaacgctgattatcggtgccagcggatataccggtgcagagctcgctgcttatatccaacgccacccgcagacggaactgaccggcctgatggtttctgccaacagtgcggatgccggaaaatgcttttcggatctgcatccgcagttccggggcctggtggatctgccgctggagccgctgacagacccggccgccgttgcacaaaataccgatgtggtgttcctggcaaccgcccatgaggtcagccatgacttcgtgccggttttccttgcggcgggttgcacggtgtttgatctttcaggcgcttaccgcgttcagcaggataatttttacccacaatactacggatttgaacacaaacataccgccttattggcgcaggccgtgtacggcctggcggaatggcagcatgacaacatccgtaccgcgcaactgattgcggtgccgggctgttatccgacggtctcccagctggcgctgaaaccgctgctggataatgacctgctggatctgacccaatggccggttatcaatgccaccagcggcgtgagcggtgcggggcgtaaagccgcgctgaataacagtttttgtgaggtgagtctgcaaccctacgggctgtttactcaccggcatcagccggaaattgccgcacatctcggcactccggtaatttttaccccgcatctcggcaactttaaacgcgggatcctggcaaccatcacctgcagactgaaaagcggcgtcaccgcagagcaggtcagcgcggcctatcacaaggcctatgacgataaaccgctggtgcgggtgtatgaccacggcgtaccggcactgaatgctgttgttggtcagccgttctgcgacctgggctttgccgtgcagggagagcatctgattgtcgctggtgcagaggataacctgctcaaaggggcggctgctcaggcggttcagtgcatgaatattcgttttggctttaatgaaacgctgtccctgctgccacagtaagcagacagcccggctcactcttttatctgacggaaaacggaaatggaaccattagtcatcaaattaggcggtgtgttactggacagcgaagaagccctcgggcgtttattcaccgcactggccgcataccgggcgtcaaatgaccgccgcattgtcatcgttcacggcggcggctgcgtagtggatgaactgatggcgaaattacagttaccggtggtgaaaaagcaggggctgcgggtcaccccggcggatcagatagacattatcaccggagcgctggcgggcagtgccaacaaaacactgctggcgtgggcgacccgttatcagctcaacggtaccggcttgtgtctcggggatggtcagagtgtcaaagtcacaccactaagtgacgaactgggccatgtaggtaaagcggcaccgggcaacccggctctgctgaatctgttactgaacaacggttttctgccggtcatcagttccatcggcatcacggaagacggactgctgatgaatgtgaatgcggatcaggcggctaccgccattgcggaaacgctgggcgcagatctggtcctgctgtcggatgtcagcggcatcctggacggcaaagggcagaaaatcaaagcactcgatggtgtacatgcacagaaaatgatcgacgacggcattatcaccgacggcatgattgtgaaagtgaacgcggcgctggaagcggcggccacactggggcggccggtggatatcgcctcctggcgtcatgcggatcagctgcatttattatttgatggcgaagccatcggcacgcggatttccgcgtaatccggattatcagcacattggcagaatcactccgcagcagcggataacatttactgaaaggacagggttatgacagaggcaaaaaaaacaggcattaaaaaaatcgtactggcttactccggcggtctggatacatcggcgattattccgtggctgaaagagcattatgataactgcgaagtggtggcatttgtcgccaatatcggccagagcgcggaagatctcgacggtgtcgagcagaaagcactgaactccggggcgtcttcctgctatgtcgtcgatctgcgtgaagaatttatcaaagattttgtctatccggtgctgaaaagcggcgcactgtatgaaggtaaatatctgctcggtacatcgatggcgcggccgattatcgccaaagctcaggtggagctggcactgaaagtcggcgcggatgcgctggcacacggtgcgaccggcaaagggaatgaccaggtacgttttgagggaacctacaccgccctggcgccacagctgaaagtcattgcaccgtggcgtgagtgggagctgcgttcccgtgaggcgctgctggattacctgaaagtccgtaatatcccgaccaccgcgtccctggaaaaaatctacagccgtgatgaaaacgcatggcatatctctaccgaaggcggcgtgctggaaagtccgtggaatcagtcgaatgctgattgctgggtatggaccgcagatccgcaggaagccccggatcagccggagctggttactgtcaccattaaggccggtgaagtcaccggggtgaacggcaaagcgctgtctccgtataactgcctgaatgccctgaatgaactgggtgcgaaacacggtatcggccggatcgatattattgaaaaccggctggtgggcatgaaatcccgcggttgttatgaaaccccggggggcaccatcatgatggcggcactgcgcggactggaagagatcatcctcgaccgcgacagcttcaaatggcgtcagcagattggcctggaaatgtcctatgtggtgtatgacggccgctggtttgccccgctgcgtaaatccattcaggcagctgcggattccctggcggaagaggtcagcggtgaagtggtgctgaaactctataaaggacaggtcacggcgatccagaaacagtccgccaacagcctctattccgaagagttcgccactttcggcgaagatgacgtgtatgaccacagccatgcgggcggctttatccgcctgtattcactctcctcgcggatccgtgcgctgaaagcgcagaaataaccggcgggagacagggagattatgcacagggacgtgcatcagactgatttatcattaaaaacagaaagggaaaaagtatggcactgtggggcggacgcttcagtcaggaagcagatcaacggttcaaacaattcaacgactcgctgagattcgactatcgtctggcggagcaggatatcaccggctctgtggcctggtcgaaagcactggtgactgtcaatgtgctgactgcacaggagcaggcggcgctggagcaggcactgaatgagctgctggcggaagtgcaggccgatccgcgtgccattctgcgcagtgatgcggaagatatccacagctgggtggaaggcaaactgatcggcaaagtcggcgatctgggaaaaaaactccacaccggacgcagccgtaacgaccaggtggcgacggatttaaaactgtggtgcaaagaggcggtcagtcagatcctcgcggcattacaggaattacagcaggcgctggtgctgacggcggagcagaatcaggattcggtgatgccgggttacacccacttacagcgggcgcagccggtgacatttgctcactggtgcctggcgtacagtgaaatgctggcgcgggatgaaagccgtgtccgcgatgccctggcgcgttttgattacagcccgctcggctcgggtgcgctggccggaaccgcgtatgccatcgaccgggaacagctggccggctggctgggattcgccggtgcaacccgcaacagcctcgacagtgtgtctgatcgtgaccatgtactggaactgctcagtgatgcggcgatcagcatggtgcatctctcccgctttgctgaagatatgattttcttcaacagcggcgaagcagcgtttattgaattatctgaccgtgtcacctccggctcttccctgatgccgcagaaaaagaacccggatgctctcgagcttatccgtggcaaatgcggccgggtgcagggcgcactgaccggtatgatgatgaccctcaaaggtctgccgctcgcctataacaaggatatgcaggaagacaaagaagggctgtttgatgcactcgacagctggctggactgcctgcatatggcggcactggtgctggaaggcattcaggtgaaacgtccgcgctgcgaggaagcggccaaacagggttatgccaacgcgacagaactggcggattacctggtggcaaaaggcgttccgttccgcgaggcgcatcatattgtcggtgaagtggtggtcggcgcgatagcaaaaggcgtggcgctggaagaaatgccgctgacagaactgcaggaattcagcccggcgattgccctggatgtgtatgacatactgtcacttcagtcctgtctggagaaacgctgtgcgaaaggcggtgtttcaccggagcaggtggctgcggctatcagtgaagccaaaatccggctgaaactggtgtgacgtaatgtattgtccccggctcaccctcttttcctgtgagccgggggtaattattgccatcagtatatttttgcctataacgcgaaagccggattccggccggtgataccttcaggaaatccgcaataatcttttcgcctttcggccagcgccgggtaagggcattatgggttttcctgatgaccgtaccgggctctgctgtattctgaccattaaggtatcctgcatttcctgcacactgctatcagtgttgccggtatttcccgatccggtctgacagttatgctttcttaccggtaacgctatggattttctgtctgtttccgtcctgtgatttaagctcgactaacaatgcagttgcgttatgatagttatcaattgattttatctattaatcgcagacggagacacaggcatgaatatccgggatttggaatatctggtggcactttctgagcataatcactttcgccgcgcggcagatgcctgtcatgtcagccagccgacactgagcggacagatccgcaagctcgaggatgaactgggtgtgatgctgctggagcgcaccagccgcaaagtcctgtttacccagcagggaatgctgctggtggatcaggcccggaccattctgcgggaagtgaaaattcttgaggaaatggcctcccttcagggagaaagcatggcagggccgctgcatatcgggctgatcccgaccatcgccccgtatctgttgccgcatatcattccggaactgcaccggctgtggccgaagctcgagatgtatctgcatgaagcccagactcatcagctgctggcacaactggacagcgggaaactcgactgcgcgattctggcgcgggtaaaagaaaccggcagctttattgaagagccgctgtttaatgagccgatgaaactggcgatttatgatgagcatccgtgggcatcccgtcaggaagtggaaatgcatgagctggccggggaaaaactgctgatgctggaagacgggcactgtctgcgtgatcaggcgatgggattctgtttccaggccggtgcgcgggaagatacccacttccgggcgacaagtatggaaaccctgcgcaatatggtggcggcaggcagcggtatcacgttactgccggatctggcgattccgccggagcacaaacgcgacggcgtgtgttatctctcctgcaccaatccggagcctttccgtgaagtgatcctggtttaccgtccggggtcgccgctgcgcagccgttacagccagctggcagaggctatccgtgcaaaaatgtgtgcttattaccagcaggagcctgcggcttaaaataagcggttaagtccgttcagtgcggcaacccggtaggcttccgccattgtcgggtagttgaaggtggtattgacgaaataatcgatggtattaccttcacctttctgttccataatcgcctggccgatgtggataatctcagccgcacgctcgccgaagcagtggatccccagaatctgccgggtttcgcggtggaacagaattttcaggctgcctgcatccagcccggcaatttgcgcccgtgccagatgtttgaactgtgcccggcccacttcatacgggatcttcatcgccgtcagctgctgctctgttttaccgaccgagctgatttccggaatggtataaatcccggtcgggatatcctctatcagatgcagcggtgcattgccgtcatgagtgatagcgcgggcggcaatccgcccctggtcataggccgccgaggcgaggctcgggtagccgataacatccccgactgcataaatcgccggattgctggtctggtaggtatcattgacactgatgagtccccggctgtcagcggtgatcccgacatgctcaagaccgagattatcggtgttaccggtgcggccgttggcaaagagcaggcagtccgccttcacttttttccctgaacggaagtgaataatcacaccgtcatccgtgccctcaatccgctcatactcttcattctggcggataaccacgccgttgttccagaaatgataggtaagtgcgtctgacatctcctggtcgagaaacgccagcaggcggtcgcgggtgttgatcagatccaccttcacactcagaccacggaaaatagaggcatattcacagccgataaccccggcaccataaatgatcacatggcgcggttcgtgtgtcagtgacagaatggtgtcgctgttatagatgcgggagtggctgaaatccacatccggcgggcagtacgggcgcgaaccggtggcgataaccacattctccgcacggagaatatcgcagctgccgtcactgtagcgcacacggacatcaccctcctcggtgaatttagcttcgccgcagaacatggtacagccgttgcgctcgtaaaaaccacggcgcatgccggtctgctgggtaataacccggccggcgtgagccaggatttcggaaaatgaagatttcagaacccgggagttatcactgtacagcggattctggttaaattcgataatacggctgaccgcgtggcgcagcgctttggaaggaatcgttccccagtgggtacagccgccgccgacgtcatcataacgctcaattacggcaacccgttttccctgcttcacaagtcccattgccacaccttcaccacccgggccggagccgatgacaatggcatcaaactggttctgttgcatatgagaagtaacctgtttatacataagttaacaacatcatcttaacatcagatggaaaatcaacctatgattagtaaggtttacaggtcacacttcaggaaatctttttttcaggaatttcaccggccataagctaatcatcactgaaaaaagtattaagtttgttatattgatccgtctgaataaattgagagtctgaattccgtgagtaacgtgattggtgtaagagcaaaacagaaagaaaaaacccgccgggccctgattgaagctgccttcagtcagctcagcgctgagcgcagcttcaccagtctgagcctgcgcgaggttgcccgtgaagccgggatcgccccgacctctttttatcgccatttcaaagatgtggatgaactggggctgacgatggtggatgagagcgggctgatgctgcgccagctgatgcgtcaggcgcgtcagcgtatcgccaaaggcgggagtgtgatccggacatcagttgcgacatttatggagtttatcggtaataaccccaacgctttcaggttattattgcgtgagcgctccggcacatccgcggaattccgtgcagcggtcgcacgggaaatccagcattttattgcagaactggcagactatctggaactggaaagtaaaatgccgcgtcagtttactgaattgcaggcagaatcgatggtgaccatcgttttcagcgccggtgcggaagcactggatattgatttggaaaagcgggcgcacctggaagagcggctggtattacagctgcggatgatcgccagaggcgcgtattactggtaccgccgcgaacaagagaaaatgcatgactccgattacaccccattaatctgacacttatcaccaaggagaacgttatgacggaacaacatcgccgtgacaaaggaaccttactgctcgcttttattgtcgggctttcagtacacggtactttttcagcactttttaattccgcagtccatttttcggtttttccggttctggcattgtgccttgcggtctattgtttccatcagcgttacctcaaccagatgctgccggaaggcatgccgaaactggtaaccggtacgttcttcctgggtctgttctcctataacgccctgatgcgcgcagaatatccggaagccggatcaaactacttttctgccgtctttattgtgattatcgcgttgtggctctaccgggcgatgaaacagcgccgtgccaccgggcaggatgaagtgacagagtaatcgcggcaatttactgaacatacccccggtggcaacccgctgccgggggttttttgtgtctgctttattgttccggccggacaatccccaggcagaccgcctcttcttttgcgcccggctgtgactgatagaccacctgtttacgcttcacgataaccagatccggccagtcttccagggcaccggtaaacggctcatcggcacaggtccggtttattttgccgatcagcagcgcaccgtgacggcggatatcatcccgggtgacatgcagattataaatattggttgcccggtaatcatggccgaactcattgatccacggctgaagtgtttccggctgatgtttaccgtaaaacgttacccattcatgcagatattccccgccggtgtatttcagcggttttccggtttcctgttcccaccagctttctgcctccgccgtaaaggttttcatcccgatatttttttgtccggcgtcacggatgttgaatcccatcactgcggcatagcccgtaatcacaatgacggcaaagactatcagcccgttcatcacgtttttcagcggttttaccggcggtgtgaccacagagcagatcagtgccggaatacacagcagaacaaaaggctgcagccactcggtaatacgtccgccctgatggaaggtgaaccagacataaatcaccgcgagtggtgccagaatcataatattgataagccgttttgcctgctcttccggccagccgaaacggccgcctttcaggcggataatgacggcaataatgatcagcggatagaacaccgtaaacagtgaaccggtggttttcagggtcaggccggttttaatctgtgaatcgacccatttaaaggcggcaaaatcattattcatcagccagataacattcggaatgaccagtgcaaaccagatggctatcgcagcataaaaccagggggaacggtaactttcccgcgctttcggcacaaacagggtgaagataaagaccatcccggtgagtgcgagcgtggaatatttccccatggtcgccagcccggatgtcagtgcaaaaccaatccaccaggccgggttgtcataaacggcgcggacaaaaaagtacagcatccacggccagaaggtgaccaggatatagttatcattataagggattaaatcgaaattaatgatccccgacagattcagtgacaacagtgccagccaggcgtaatcagaacgctgtgtgaggcggtgtgtcagataccacaccccgcacataccaataccgatgccggtaaaatgaatgaagtaccagtaaaaatcggcagcaatcaggtcagggaaggcgatgaccgggtacatcagcataccgaccagccacggatttttcggtgcaccccattcaccggttttgccccagttcagggcttccacggcatcgtagggcaccgtcggatccaatccgtagctgacaataatccagagcgtgacataagcagcgacccaaaaccagacagggcggtgcgacgtttgttgtgaaaagtgcataattctatatcttggttaaaataatggctgtgttcattattcacccggaggcgaaatgatagatcgttttgacggaaatcagggtaaactagccgccagcgaatcattgtcatggctgcgggcagcccggaagccatgaatatagttttgtactgttcatttacgtggtaaatgttaacacaaattaatcagttatttttaagcgagtaaggtatatggccgctatttcaaaaaaaccagcccggtcacggacaccaaagaaaagccgtgaggagctcaacgcggaaggccgtgaacgcaaacggcagaaaaaacaccgcggtaatccgtccggtgcccgtcagcaggatgatgcccgcaagaccggccgtggtgcggagaatgcggttgctgatccgcgtatcggcagtaaaaaaccggttccgctgtttgcggaaggtaaaacctccgtcaaaccggcggtaaaaaaaccggctgagccggtcaaagccagactgtctcctgaagaggaactggcaaaactcgagaatgacgagcgtctcgatgcactgttgctgcgcctggagaacaacgaaaccctgaccgcagaagaaaacacctacgttgataccatgctggaacgtatcgacgcgctgatggaaaaactcggtatttctcttgatgaagatgatgatgaagagaaaaccgacgacatcatgcaactgctgaaagggcgctgatcctcagttattttactgaaaccggcggtactgcatcaaaaccggcgtaacgggcgactgttatgccggttttcttattttaagcctacgtgtttgccgtgttatctgccttaacagaggattaaacagcgccgtgcggcggtttttctgtgacagttatggcagatatcttactgagaataataaataattctgaagagtaatacgggattatgctgatgctgttcaccgggagaaaccaatgagtgatacaaaacgtccgccgcacgatcacagccgctttatccgctgcctcggctgggtggcaacctttacggcattttgtatgtatgtctcctatattccacagattatggataatctggcgggacataaaacgtcaccgctgcagccgctggctgccgcatttaactgtacactttgggtgatttacggccttaaagtgaaagatctgccggttgcggtcgccaatgcccccggtgtcctgttcgggctggcggcgatgctgactgcattatagtgatccgtctgattatccgtctgtggcacgatcatattaatcgggcggcagatccgataaactgtgcggcacacaaaaccgtcagagaacggaaatacattaattctgcaatggtgaggcaaaggggagagcatgtctgacgcgatcatctgggatctggcattgatccggaaatataactattccggtccgcgatacacttcgtatccgaccgcactggaatttaatcagcagtacagtgacagtgattttatcgcctcagcaaaccgttatccggagcgcccgctgtcgttatatgtgcatatcccgttctgccataaattatgttacttctgcggctgtaataaattagtcacccgtcagaagcataaggcggatgaatacctggccgtgctggagaaagaaatcgccgcccgtgccccgttgtttgccggacgcgaagtgcatcagatgcactggggcggcggtacgccgacctatctcgataaagcacagatcagccgtctgaccggtatgctgcgtcagcatttccgctttgcgccggatgccgagctttccattgaaatcgacccgcgtgaaatagaattggacgttatcgaccatctgcgggcggaaggatttaaccgcctgagcatgggggtgcaggatttcaacaaagaagtgcagcgcctggtcaaccgcgagcaggatgaagcgacgatttttgcgctggtggagcgtgcccgtgcaaccgggtttgaatccgtcagtatcgacctgatatacgggctgccgaaacagacgccggaaagttttgcttttaccctgaaacgggtggcggaactgtcaccggatcgcctgagtgtctttaactatgcccatctgccggacctgtttgccgcccagcggaaaatcaaagatgaagacctgccttccgcagagcagaaactgacaattttacagcagacgattgaaaacctgaccggcagcggttatcagtttatcgggatggatcacttcgccaaaccggatgatgagctggcggtcgcacagaataacggcatcctgcaccgtaatttccaggggtacaccactcatgaggagtgcgatttgctgggctttggtgtctctgcgatcagcatgctgggtgatcactatgcccagaaccagaaagacctgaaaacctggtatgcacaggtggaagagcgcggcaacgggttgtgccgcggtctggtgctgactgaggaagattgcctgcgccgcgatgtgattaaggcgctgatctgcaacttccggctggattatccgcagattgaaaagcagtataacctggattttaaaacccatttcgccgaagatttgcaattattgcagccgatggcggatgacgggctggttgagatccgcgacgatgctctggtggttacaccgcgcggacggctgcttatccgtaatatctgtatgtgtttcgatacttatctgcgcaaccagatgcgtcagcgtcagttctcccgcgtgatttaatctgtttccggggttgatgcagtgtcatcaatcccggcttctttcagtttccgcgtcagcgtattgcgcccccagcccagcaggcgggccgcgtcctgcttgtgtccgttgctgtaattcagtgcgcactgtaacagggtgcgttcaaacagcggcagagcatccgccagcagatcggttttcccggcccgtaactgtgcatccgcccactgcgccagctgctgatcccagtttccggctgccggattatggctgtgctcactgcggatatgttctccggcggcggtcatggtcaggtcggcaggcagatcctgcggcagcacttcctgggtggcggacatcacggtcagccagcggcagacgttttccagctggcggacgttgccggaccacggcaactgcatcagcagtgcttcggtatccggatgcaggcttttcgcttctgttcccagctcttttgcggttttctgcagaaaatggcgtgtcagacgcggaatgtcccccggccgttcccgcagcggcggcagctgcatgcggatcacattcaggcggtggaacaggtcttcacggaatttaccttccgccaccagccgctccagatcctgatgggtggcggcaataatcctcacatccactttcaccggtgcgtaaccgccgacgcggtaaaactggccttccgccagcacacgcagcagccgtgtctgaatatcgagcggcatatcgccgatttcatcaagaaacagcgagccgccgtccgcctgctcaaaacgcccccggcgcacctgtgatgccccggtaaatgcccctttttcatggccgaagagttccgattcaatcaaatctttcgggatcgccgccatattgagagcaataaacggtgcatccgcccgcgggctgtgatggtgcagggcgtgagccaccagctccttcccggtcccggattcgccgttaatcagcacactgatggaggaacgggataaccggcctatcacccggtatacctcctgcatggcagcggattcaccgataatgccggacaccggatcggcggccgcttcctgccgtaccggcagatgctgctcgcggtaatgttccagggcgcgggccaccagtgtgaccgcatcatctatatcaaacggtttcggcagataatcaaacgcgccctgctggtaagcattcactgcggcatccaggtcggaatgggcggtcataataatcaccggcagtaacgggttatgctgtttgaccgccgccagcagagacaggccgtccatgcccggcatccggatatcggagatcagcacgtccggctgtccgctgttcagggccgcaagggcattttcagcactgtcaaaacagacacaggcataaccggcgctgctcagtgcgcgctcaagcacccagcggatcgcgctgtcatcatcaacgacccagatttttcccggctgcatatgacctcctcaacaggcttactgacggattggcagataaagtgaaaataaggtgtgacccggccagctgctgaactcaattttgccgttatgctgatcgataagattgcgggcaatggataaacccagcccggagccgccttcgcggccgctgaccatcgggtagaacagggtatccaggatatgcggcggaatacccgggccgttgtcctcaatatcaatcctggcggccagccggtagcgttcaccgtgcagcattacctggaatgcggtgcgggtgcgcagaataatggtgccgcctgcggaatgcagggcttccagggcattgcgcataatattgaggataacctgctcgatctggtcgggataatgcgacaactccggcaaactgggatcgtagtctttaaccagcgtgatattgtccggtttttccagattgatgagctgaaaaacgcgctccgccacatggtgaatgctctgcatacttttctgccccggatgctgagggccgagaaggcgatcaaccagcgcccgcaggcgatcggcctgttcgataatcacctgtgtgtattcctgcagtgccgggtccggcagcgcgcgggataacagctgtgcggcaccgcgtaacccgccgagcggatttttgatttcgtgcgccagtccgcgcaccagatcacgggcggcggcctgctgcgcctgctgtaattgttcctgagtaatgcgccggtgactgtccagcggtgtcagttccagcagaataaaatcgccggataccggctgggcactcagcgaaagagcgtgcatttggttatttaccaccagggtcacatcgttgtcagtaaagctgtggccttctgccagtgtggcctgcaatgtggcggtatcgagggaaaggtagctgtataaaatagggagcggtgtgccggtgagtttacgggcactctgggcgaataactgcatggccgactgattggcgtaacggataatcaaatcattatccagcagcaggacacagttgatcagtgaatcaaggagctgctctgcctgcggtttgttatccgggttcatattatccacctctttgcaccaatttggtgcattgtagcgtatttaccccgcaggagaaaaggacccgcccaacggcgggtcaagtgcttcacggcaacaaaataaaccggaacctgtcactctgagtgccgccaaacggcggcactatcagaatcacacgctgtaatacatatcaaactcaaccggatgcggcgtcatattcaggcgctgaacatcagcacgcagcaggtcgatataggtgttaatcgcatcttcggtaaacacaccgccgcgtaccaggaactcatgatccgctgccagcgcatccagtgcatcgcccagagacggtgcaactgtcgggatttctttcgcttcttccggcggcaggtcatacaggtttttatccatggcatcgcccggatgaattttattgatgatgccgtccagaccggccatcagctgtgcggcaaaggccagatacgggttagcagccgggtccgggaagcggacttcaatacggcgggctttcgcgctggacacaatcggaatacggattgaggccgaacggttacgtgcagagtaagccagcatgaccggtgcttcgtagcccggcaccagacgtttgtaagagttggtggtcgggttggtaaaggcgttcagggcacgggcgtgtttgatgatcccgccgatgtaatagagcgccatttctgacagaccggcatatttatccccggagaacaggttaacgccgtcttttgacagagacatatggcagtgcataccggaaccgttatcgccgaccagcggttttggcataaaggtcgcggttttgccgtagcggtgcgccacattctgcaccacatatttgtacatctgggtttcgtccgctttcagcgtcatggtattgaaacgggtagcgatttcgttctggccggcagtaccgacttcgtggtgatgtgcttccacgaccagacccatctcttccatgaccagacacatttcagaacgcagatcctgtgaggaatcgaccggcggcagcgggaagtagccgcctttcacgcgcggacggtggcctttgttaccttccggatagacagtaccggtgttccaggcagcttcaatatcattgatatgatagtaagcaccggagatatcggcaccgaaacggatgtcatcaaacaggaaaaactcaggttcaggcccgaacaggacggtatccgcaataccgctggtgcgcaggaaatcttcagcacgttttgcgatagagcgcgggtcgcggtcataaccctgcatggtgttcggctctaacacatcacagcgcagaaccagtgtcgggacttcaaagaacgggtcgatcagggcggattccgcaatcggcatcagtaccatgtcagattcgttgatgcctttccagccggccattgaggaaccgtcaaacatttttccgtcttcgaagaaatcttcatctacctgatgagcagggatcgacacatgctgttccttgcctttggtatcggtaaagcgtaagtccacgaatttaacgttgtactcttccatcatggtcaatacatgttcaacagacatattcagatctcctggtttgggatgttccgtcaatcctctggtggtcacccggagggacactgattgcggttctcacattgcttgataaacataaagcgaaaagcgtgccaacttttttaaaagggggtaagccgcgttactgctgcgggttactcagataaggatagcggaaacagggtgaattgcaccatattggtgcatttttgattcagcttgcagatccgcgatgcactgttatggtgcaatgaaatcagtgcaccgtttcccggccacaaacgcaaaaaaagtatctcttttatcctgaataggtttatgatatgcccctctgaattcgtcgctgagcgtggtatgcgccgctgattttgtaaaaaaatggcaggatgaattttatctccatgttttataatcatttattttttaagtgagatgtatcacacttctttcacttgcctcagagaacgtgtaaaataccaccaaacatctacaccatagatgggcgttgttgaaaagaatgctatctgtgacgtaattcccatccattaacgaaaacggtacaagtctttgtctatcgagaaattaagaaatattgccatcatcgctcacgttgaccatggcaagaccacgctggtcgataaattattacagcagtccggtacgtttgatgagcgttcaaaaccggaagagcgtgtaatggactccggcgatctggaaagagagcgcggcattactattcttgcaaaaaataccgcgattacgtggaacgactatcacatcaacatcgttgacaccccggggcacgccgatttcggtggtgaagtagaacgtgtgatgtccatggttgacagcgtactgctgctggtagatgcgatggacggtcctatgccgcagacccgctttgtaacgcagaaagcgtttgcaaacggtctgaaaccaatcgtcgttatcaacaaaattgaccgtccgggcgcacgtcctgactgggttatcgaccaggtgtttgacctgtttgacaacctcggcgcaactgacgagcagctcgacttccctatcatttatgcatctgcgctgaatggtattgcgggcaccgattataacgatatggcggatgatatgactccgctgtacgaagctattgttaagtatgttgagccgcctcaggttgacctcgacggcccgttccagatgcagatctcccagctcgattacaacaactatttaggtgttatcgggattggccgcatcaagcgcggtaaagtcaaaccaaaccagcaggttactgttatcgatgcggaaggtaaaacccgtaacggtaaaatcggtaaggttctcggacatttaggtctggaccgtatcgaaacggaagttgctgaagccggtgatatcatcgcgctgaccggtctgggtgaactgaatatctcagatactatctgtgacaccaactgtgttgaagcattaaaaccactggccgttgatgaaccgaccgtcagcatgtatttctgcgttaacacctcaccattctgcggtaaagaagggaaatatgtgacttcccgtcagatccttgaccgtctgaagaaagagctggttcacaacgtggcactgcgcgttgaagaaactgaagacccggatgcattccgtgtatcaggccgtggtgagctgcacttatctgttctgatcgaaaacatgcgccgtgaaggttttgagctggcggtatcccgtccgcgcgttatcttccgcgatatcgacggccgtaaacaggagccgttcgagcaggtgactctggatattgaagaacagcaccagggtgacgtgatgatggcactgggtgagcgtaaaggcgaactgcgtgacatgatgccggatggcaaaggccgcgtacgtctggattacagcatcccgagccgtggtctgattggtttccgtactgaattcatgaccatgacttccggtaccggtttactgtatgccacattcagtcactatgatgatgttaaacagggtgaaatcggccgccgtcagaacggtgtgatgatttccaacggtcagggtaaagcagttgcatacgcactgtacagcctgcaggatcgcggtaagctgtttgtcggtcacggtactgaagtgtatgaaggccagctgatcggtattcactcacgttcaaacgacctgacagttaactgcctgaccggtaagaaactgaccaacatgcgtgcatccggtactgatgaagcgaccacactgactccgtttatcgagaaaaccctggaacaggcgttagaatttatcgatgacgacgaattagtggaagtaacgccgaagtctatccgtctgcgtaaacgccacctgactgaaaacgaccgcaaacgcgcacaccgcagcaaagattaatctctgccggttgttttgattcatgccactcagggcgcctccgggcgccctgagctttttctgcgtgctgattacataccggtcacaggctgataaccgcactgaaatacgggcgggatcgcactcccggatattttttctcaccgaaaatggttttcactctgttcaggaagggactctgcgggtagagtaaaaataattcatcaacccggagggatggtatgctttatatttttgacatgggtaatgtcattattgatattgattttaaacgtgttttatcagtctggagtaatctgagcggcaagccgctgtccgaactgagtagtgattttattcacggtgaaacctttaaacagcatgaatgcggcaaaatttccgatgttgaatttgctgaagctattaatgaccagctggatatgtcgctgagttttgatgagtttgccgaaggctggcaggctatctttatctctgtccgccctgatgtgattgatatcatgaacaggctgcgtgagcagggacaccgcgtggtggtgctctctaacactaaccgtctgcatcaggattactggccgcagcactatccggaaatcgccgcttctgcggatttcctgtatctctcccaggatctgggactgcgcaagccggacccggatatctatcagtatgtgcttgaaaccgaagagtttgagccgcaggatgccgtgttctttgatgatgtccgcgaaaacgtggatacggcagtggcactcggtatcaaaggcgtgttggtcaccgatcgtgacacagtctcccgttattttgcagagtatgatttttcagcagaagtgactgagtaattcaggtgtgattgttttttaaacggatatgacatgattgcattaatacagcgtgtgacccgcgcggatgtccggatcgccggggaaattgccggtgaaatcggtcccggattgctggttcttctgggtgttgagcgggatgacgacgaacaaaaatcaaaacgcctgagtgagaaagtgatgggttaccgcattttcagtgatgcggacggaaaaatgaacctgaatgtggcgcagtccggcggtcagctgctggtggtgtcacagttcaccttagcagcggaaacacaaaaaggaatgcgcccgggattttcaaacggcgcggcaccggaaaaagccaatgccttatatgagcactttgtagcgcagtgccgtgcagccggaatggtgacggaaacaggccggtttgcggctgacatgcaggtcagtctgacaaacgatggtccggtcactttctggctgcaggtatgatacaacagtctcaggccggtcaccggttaccactgacaggagaaagtgcgatgtatcatttacgtgtaccaaaaaccgatcaggagctggaaagctattttcatttccgctgggcgatgctgcgcaagccgctgaatcagccgcagggatcggaaaaggacggttatgatacctatgcacatcatcagatggtggtggacgaaaccgggcagcctgtggctgtcggccgtttgtatatcaatgcagaaaatgaaggcgcgatccgctttctggcagttgatccgcagatgcagggacgcgggctgggcacactgattgcacgcgcactggagtccgtggcgcgtcaggaaggtgttaagcggattgtctgcagtgcccgtgaggaagcggtcgcattttttgaaaaatcaggttttgaaaacagaggaccgattacaggcccgcaaacgacgcctgttcgtcatttttttatgattaaatccgttgaaaccctcgatgcgatcctgcatcgtcctgactggtgtgctgaattacagaaagcatggtatgaaaccattcccctgagcgaaaaaatggggatccgcattacgcagtacaccggtcaggaatttatgaccaccatgccggaaggcccgaaccagaacctgcatcagaccatttttgccggcagccagttctcgatggcgacactgaccggctggggacttatctggctgctgttacaggaaaactccctggacggcgatattgtgctggtggatgccaatatccgttaccgcaaggccgtggcaggcagaccagaagccattgcttcccgcgataaactcagcggcgacctggatcgtctggcacgcggcagtaaagcgcggattaagctggaagtgactgtcgggcagggggatgaagtcggcgcggtctttaccggtacctatatggtgctgcccggccagaaacacagcgcggagtgagaggtaaaacacatttctttcgctgtggctgacagagaggacaattggtcagatacggcggtgataacgggcaggcggacgaaaagcatgcgcgtcatggatgacgctacagcgccttacggcgctgtttttgtatcagcaaaggttacagaatttctccggtttcgctgttatccgggatcacccgctgtgcaggcggggcagaaggtaccggctctgcggatcccggggtgttgctcatctgtccctgcgtgatagcccggtttatctgatttccctgtttatcctgtccggagagcatgccgctcagtgtgctgcggatatcctctgcccgcaactgcccgttcagacgcagggtgtaattggcgctgccggtcagcggagcaggttgccagccccattgtgacaggatctgactgtccgcaccggttgcctgtaatgtgaaactgaaaggcacagtaccggatggcgtggcctgaaactgcattttcagcaacccttcctcggcagaggcggcaaattgtgtggttgccgcgctgtcagttccggcagtcagagtcagatacgggcggtgcagttcgacccggttaaaggtggcattgccggcactgacagaaagctcgccgtcccataatccccactgaccggatttcaggatctgcatggttttgatgtagccgttcacattggtgagctggaacgggaaaaccggctgtgtatcaatcagcagggcattggagactttaatatcctgcaggcggatagcatcaattccctgcggggcggcttcctgtaatgcggcgaaccactgttccgggaggctgtacagcaggttgtcggcgacaccgctggtgatatccagtgtccgggtggcgcggttccactccccggtaaagcgcagaatactcttgtcatagcggccggtcagacggttgaccgcaatctgatcgccgcgcagttccagggtgctgataatgtcagaaaaatgctgcccgctgagtgtcagatctgctgcggcgatatctgcctgtccgttgtccgtctgccagcgcccttgtttaaaggccagatttttgaccgtgccttccagatagtttaccgcccactgatgaccttcgagcttgatattggtggcggtgatattcctggcctgaatatccggcaggttttctgtgctgtctgccagctgtgtcagtgtttgcggtgtctgccagcggatatcattaagcaacaggttatccagctgccactgaccttcggcgctgcggcgtccggtggcggtgatcaggccgttttccagtgtggcggtcaggttatcaaacgtgaattgttttccgctgacctcgccctgtgtcaggatatttttcagcggcagcccgtagtaattcaggctgttggcggaaaactggtatttgccgtttccggtcaggtcactgccctgcggctgccacggtgtgatcccgccggtaacaccttccgcgtcaattacccggttgccgtcggtgcggcggagtgcggtctgattgagctgtaataacccggcactgaccggcagggtgctgctgtcagcagcatcagaaatttcgatatcccctttctgcacaatgatacgggcaaaccagccgggttcagaaaaactgcgccagtccagggtcagctcaacattggccgcttccagggcaaaatcaccggaaaccgtgctgatgctgacatcactgagtgaaataagtgagggagatgagagcgagtgacttatcgcggaaagcgagactttgtagcgtgtgttgtcactgataagggctgaaacctgttttgtaccccatgatgtctgcaccacaagggccgtggcaacgataagaataatgaccagtgttatcagccagaaaacagcccgtcccaaccatttcataatgcgctccccgatagataatcctgagggcatactagcgtgaggctctttatggtgacaaggattatcgcggtttttccgcacagagcagcccgcgtgaccgtttccggtcacgcggttaaacagatgattatttctccggcggaaaaatcaggttcagggctatcgcggtcagaccgcccgccgcaattcctgaagaaagcagggttttcagccagtccggtgcgaactgcaggatcagcggctgctgggaaacccccatgccgacagccagcgacagcgcaataatcataattgcccggcggttcagggtttcgcgggaaacaatccgcaccccggatgccgcaatcgtcccgaacatcacaatggttgcaccgccgagtaccggctccggaatgtgctgcacaaaaccggctacggccgggaacagccccagcacgatcagcatcagtgccaccacataaccgacataacggctggcaacgccggtcagttggatcacaccattattctgcccgaaacaggagttcgggaaggtgttaaagaccgcagacagggcggaattgagaccgtttgccagcacgccgcctttcaggcgcttcatatagagcgggccggacaccggttgttcggagacatcggacgtcgcggtaatatcaccgatggtttccagcgaggtcaccataaagatcaggatcagcggcagcagcaggttccagtcaatggataagccgtaatagagcggtgccgggatcacaatcatttcttttggaatttctgcatggttatccggcagcatgcccatccaccaggcggccagatagcccgcggtcatcgccagtaccagtgaagcgacgcgcagatacgggtttttctggcggttcagcagcacaatcaccgccagcacaataccggcgaggatcaggttatcggcagagccgaaggtgttatccgccattgcgccataaccgccgccgatggaggtcagcccgacctgaattaatgacaggccgataatcatcaccaccacaccggagaccagcggtgtgataatacggcgagccagatgcaggaaacgggagaggatcacttctgtcatcgccgccagcatcagtgtgccgaacagcgccgccatcattccttccgtatccacaccattatttttcagtgccataccccccataatcagcggggcaacaaagttaaagctggtgccctggatagagagcagccctgagccgaccggcccccaggtacggatttgcagcagtgaggccagcccggaagcgaacagcgacatactgataatccgctgggtatcatgggcggaaaggccaagcgcctgagcgataagcaaccccggcgtaatcaccgccacaaacatcgccagcagatgctggcaggcggcaaagagggtctgcggcagcggcggacgatcttccagacggtagatgagttcactatttgtgttagtcgcgggagttacactggttttgtcagaaattgcagagttcatgtcaacaggtccgggataagcaatttccgtattttaatgatctgcggcacaaaagcaatcgtttgcgcggatgagatgttattttttatagcggaatataatcacagttttatttattttaacttgtctttatccgcttttttttctttaatcccgatacctgctttttttcttgcgtaataaggacgttattaacgcgatactgatgtaacaaataccaacaataaaaggggtacgtgaatgtatcaactcgacgtttacggcacgctggttgcggccacactcgtcctattactgggacgtaaactcgtaaaaactgtaccattcctcgaaaagtatactattcctgagcctgtggccggtggtcttctggtcgcgattgtattattggggctcaaatccggtatggatctggaagtgaaatttgatgattcactgaaagacccgctgatgctggcgttcttcgccaccatcggcttaaacgccaacttagccagcctgaaggcgggcggtaaaacattatttatctttgtgattgccgttgtgggcttactgattgtgcagaacagtgtcggtatttccctggcgaaaatgatggggcttgacccgctgattggtctgctggccggttctatcacactttccggtggtcacggtaccggggcggcatggggtaaaattttcagcgacagctatggtttcacctctgcaacagaaattgcgattgcctgtgccacatttggtctggtgctcggcggcctgattggtggtccggtggcccgtttcctgatcaaaaagacagccatgagcgatgtgaaattacaggatgatgaagcaccgaccgcgtttgaaaaaccgcaggccggacgcatgatcacttcaatggttctgcttgaaacaattgcactgattgctatctgtttgctggcagggacgtatctgtatggtgttctgacggatttcttcacgtcgatgcagtggaagttccagatcccggcgttcgtgtgtgtgctgtttatcggggttatcctgagcaacagtctgtcactgatgggcttctaccgtgtgtttgaacgggcggtgtcggtgctgggtaacgtcagtctgtcactgttcctggcgatggcactgatgagcctgaaactgtgggaaatcgcctctctggcggtaccgatgctggtgattctggcggtacagaccgtggtgatggcgctgtatgccgtcttcgtcacttaccgtgtgatggggaaaaactatgatgcggcggtactggctgccggtcactgtggcttcgggatgggcgcgacaccaaccgcgattgccaacatgcaggcggtaactgatcgcttcggtccttcccatgtggccttcctggtggtaccgatggtgggggcgttcttcctggatctgattaacgcactggttattccgttcttcctggcgttacctatcttcccggctgcgggcgggtaacagaacagttcttaaagcaggcaagccacccctccgggtggcttttttcgttatacgttggtgtattgtgtgcgttccggcagccagcgttctatcagggcttttgcctgttccggatagttttggtgcagatgccgtgcaacgcgctgtacttccggcagcatgccctggtcgcgcagtaaatccgccactttaaattccgcattgccagtctggcgtgtgccgagcagttcccccggcccgcggatttccaggtctttctgcgcgataacaaagccgtcgttgctgtcccgcagtacctgaagacgcagttttgctgtctgggtgagcggggttttatacagcagcacacagtgggagaccgcagagccgcgcccgacccggccgcgcagctgatgcagctgtgccagcccgagccgttccgggttttcgataatcatcaggctggcgttcggtacatccaccccgacttcaatcaccgtggtggcaaccagcagatccagctcaccggccttaaactgtgccattaccgcctgtttttctgccggtttcatgcggccgtgaaccatcccgacccgcagatccggtagcgtggcggacagctcatcaaacgtgacctgagccgcctgggcttccagcaaatccgattcatcgatcagggtacagacccagtaagcctgacgtttttcatcctgacaggcattgcgcacccgctcaataatctcatggcggcggttgtccggaatcgccaccgtggtcaccggggttctgccgggcggcagttcgtcgataaccgaggtatcgagatctgcataggcagtcatggccagagtacgcgggatcggcgtggcggtcatgatcagctgatgtggatggaatccctgctgttcgcctttttcccacaatgccagccgctggtggacaccaaagcggtgttgttcatcgataatcaccagcgccagggaatgaaaacggatatgttcctgaaaaatggcgtgtgtgccgataaccatggccacatcaccggcagcaatggcgtcttcctgtgcctgtcgtgccttgcctttctgtttcccggcaacccagccgacactgatacccagcggctccagccactgacggaaagtattggcgtgttgttcagccagcaattctgtcggtgccatcagagccacctgtctgccgtgtgcgatagcgcgaagtgccgccagcgcggcgaccagcgttttccctgagccgacatccccctgaatcaggcgcatcatcggtaccggtttttccagatcctgctctatttccgccaccacgcgctgctgggcattggttggtgagaagggaagttgtgccagaaactgatttttcagtgtttcctgcggtgacagcggcagtgcgtgataacgctgtgcccctgctctgaccgccagcatgctgaggtgatgcgccagcagttcttccagcacaatccgtttcagtgccggatgctgcccgctttccagttcggcaagctgtgtatccgccggtggccggtgcagcgttttcagcgcctgcggcaggctcatcatagagcgggtcagttccggcggcagtaattcattaatggcgcaggtatcgagcaactccagcgcctgatcgagcagtttgcggagtgtggcctggcggacaccttcggtggtcgggtagataggggtgagtgtttcctgtaattcaacggaagtatcactctggcggactttgtattcggggtggaaaatctccgggccatttttgccgcgccggatttcaccgtaagcggtgacctgttttccggccaccagcgcatttttcatcgccgctgaaaagttaaagaaacgcagggttaagatgccggtaccgtcgcttatctggcaggtcatcatccgcttgcggccaaagaccacatcggtgcgcagcacttcgccgctgacggtggcataaatcccgggtaacagatcggtaatggtataaagccgagtctggtcttcataacgcagcggcagatggaaaagcagatcctgaagggtgtgcagaccgataccggccagtttgcccgcctgcccggccccgacgccgtgtaaagtcgtgagtgggatagcatcaagcagttgacctttcattttctgctccgtttcgtatcaggcggatggtttcttctgttgcatggcagcccaccagctgtccggcgcaataatatgaccctgttcatcaatctgcggacggggcagttttttctcgcgggcgacctgggccagcaccggataaccgcgttcaaacagcaggcgctgctgttcatcctgtgccagggcacaacggggatgctcatagagaccggcagcttcacgctggcgttgtgcctcatagaggatcacggcggcggcaacagacacattcagtgactgtaccatgccggacatcgggatcataatatgctgatctgccagccggatggcttcctgagatatgccggttttctccgagcccatgataatgcaggtcgggcgggtaaaatcgatcgcccggaaatccaccgcgctgtcagacagatgagtggcaagaatctgcataccctgtgatttcaggagggtcacggcaccagcgagtgtgtcgtggttatgcacatttacccagctgttgctgccggcggcggaagagaccagggttttgattttttccggccagaccgcatgcagatcatggataccgacagcatccgcgctgcggatcaccgccgagacattgtgcggcttatgcacttcctcgagacacagggtgaggtcaggctggcgcatcgccatcatccggcagatgcgctcataacgttgggaattcataccgtgtgattaattccggttacggctgacgcgcaggacatccggcataatgcggatcttacgcataatattcgcaagctggatacggtcttttgcggtcaggcggataaaggcgcagtaaacgcggccatctttctcctcggtattcatgctctgaatactggagttggcatcattaattgcggcagtcaggttagccagtgcgccctggtggttaaacatatccactttgatttcagcaataaaatcggtgtcgatatcattatcccactcaacagccatgaatttttccggttctttttcatatccgcggatattacggcaggattcatggtggataaccagccctttacccggactgatatgggcgataatcgggtcacccggtaccggacggcagcatttggcgaaggtgataagcactccgtccgcgcctttgatcggcagcttgcgggtggtgctctcttcggtattactttccggctcgttcagcaggttacgggcaaccaccacactcatggcattccccaggccgatttccgccagcaggtcatccagagtcgccagtttcatccgcaccagctcacggctgatattttcctgagggatatctgtgatcttacggccgttaccgagtgcatggttgagcagacggcggcccaggttgacagaatcatcccttttgaggtttttcagtaactgacggattttcgcccgggcttttgagctgacaacaaagttcagccacgcggcattcggccgtgcgcccggtgcggtaataatttcaacggtttgtccgctggtcagttgctgggagagcggatacggctggcggtcaacgcgcgcgccgacacaggagtggccgatgtccgtatgcacggcataggcgaaatccaccggagtggcgccggtcggcagttccacaatccggccttccggcgtgaagacataaatctcatccgggaagagatcggatttcacgctctcaataaattcaaaggtgttgccggtgctttgctgaagttctatcaggctctgcatccagcggtgggcacgcacctgtgcggtggtgccggattcaccgtgctctttataagcccagtgtgcagccacccccatttccgccatctgatccatatcttcggtccggatctgcacttccaccggcaccccgtgagggccgataagggaggtgtgtaatgactgatagccgttggctttcgggatggcgatataatctttgacgcggccgggacgcggtttgtacaggccgtgaacctgacctaatacgcggtaacaggtgtcgacagtgcttacaatcacgcggaatgcataaatgtccatgatcgagtgaaaacgctgctctttcaggtgcattttccggtagatggagtagagatgtttttcccgtccgctgactttgcagctgatcccggcttccgtcagacgcccttcgatttcggataaaatcttctggatcatctctttacggttgccgcgcgcggctttcaccacttctttgatgacgcggtagcggttcgggtaaagggcttcgaatcccagctcctcaagctccgttttgatatggtgaataccgagacggtgagccagaggactgtagatttcaagggtttcgcgcgcaatacgacgacgcttatcgggacgcagagacccgagcgtgcgcatgttatgcgtgcggtctgccagcttgatgagaatgacacggatgtctttcaccatcgccatgaccattttgcggaagttttcagcctgagcttcttttttatcgcggaagttcagtttgtctaacttcgataccccttccaccagcccggcaaccgtggtgccgaacagttgttcaatatcctgaaaggtggcaggcgtatcttcaataacgtcgtgcagcagtgctgccatcagtgtttcgaggtcgagacgcatctcggccaggatacaggcaacagcgaccggatgggtaatatacggttcgccactggagcgggtctgcccttcgtgagcatcccgcgcaacgatataggcttgttttaacagatcaatctgctctttcggcagataatccttaacaatatggttcaggctttcaaacaggtacaaggcagacctaccttaacttaacgacgtccttcggcgattgcagaaaccgcttgcatttcagcagcttcctgctcctgttgttcctggcgctcacgggcgtcaaggatctggccgttgatcagattttcttcgatttcgcgcagggcgatcacggtgactttatcgttttcttccggaaccagaggctctttgccgccggcctgtaactgacgcgcacggcgtgctgccactaatacgaggtcaaaacggttaccaattttttctactgcgtcctggactgttacgcgtgccataggtgtgctactccacagataaataaatgactcggcatgatactgaaagttgtatcactgtgccaataatttggcgattaaagcatcatgtcgctgaacctggcgacctgaacgcagacgttccgcacggataatcgtctgtaaatcggtcagcgcgacattaaaatcatcgttcacaatcagataatcgtactcgccatagtgctgcatttcactgaccgcctgtgccatacgtccggcaatgacttcgtcagtgtcctgaccacggccgcgcaggcggcgcagcaattcctcacgggacggcggcagaataaagatactgcgggctgccggcatctgttcccggatctggcgggctccctgccagtcaatatcaagaaatacatcaacaccggagttcaggatatcttccactgttttacgggcggtaccgtagtaatttccgaagacacaggcatgttcgagaaactcattacggccgatcatgcttttgaattcatcttcagtggtgaagaaataatgctctccgtgcacttcgcccgggcggataccacgggtggtgtgcgaaacagaaacctgggtgtcatataaaggctgtgttttcagtaatgcctgaataagactcgattttcccgcaccactcggcgcagagacaatatataacgtaccttgggtcattgttgatgtcttgtctgattgggggttgaaaaagcctcggggaataaatccccgcatatagtatacacacacgcgcagcgacatgcagcgttcaggtgattatctgctgaaaatttcttatttttccgggcagatgaatacggatgtttcatttttccgcaccggcggaataaaaatgtatgcatatacccgtcagttacatgacagtgcgggacaacaggaaaaaacagacaaacagggcagataagcagaaccggaaccggtattgtccggttccgggtgagcggttattgccgttaatcctgattttcgtaattaaagaccggtaacccgaggcggtagcggatggcaattaaccgggacgtcaggccggccaccagggtaataataatgacggcatcgcgcggcagcggcgtgtaaaacagtaatcccatatagagccaggcagcggcaaaggagataccggcatataattctttctggaaaaccagcggaatggtgttacacagcatatcgcgcagcacaccaccgaaaacaccggtgataacggcggcaatagccgcaatgatcggcccgtagttcatatcgagtgctatctgagcgccgataatggaaaataccatcagcccgatagcatccaggatcaggaaaaggcggcgcagatgcttcatcatcggcgcaacccagatagtaataacggcagcacaggcaaccgtaataatatattcaggatgttttacccagcccagcgggtaatggcccagcagcatatcgcggacagatccgccgccgatagcagtggcggaggcgataataattacgccgaaaacatccattttccggcggccggcggccagtgctccggtcatggcttcagcggtaataccaataatgtacaggatactgagtaacatagtcttatcattgccggtttatcggaaggttagcatagtcagcacagccgaaagtctcgactgagtttttttagtctgacccaatcggattacctgaggttatccgaactgatggtataaaaagagagtatcactctaatgaatgaatatcagataacaacaacaccccgtcatcatcagcttactaatattaatgtatggacgccggatagccaatggctggtttatgatgtccgccctcaggggtcttcgtttatcggtaaaacgatagaaaaaattcatgtgaatacaacagaaatccgtgaaatttaccggggaaccgccggggcctgtgtgggtgtggtgactgtcagcccgcagttgccggtgcggtatgcctttatccgcgggccgctgaacccggatccgcagtggcagtatgatttccatcaccgtcagggggtgatggtcagtgatgatgtgccgggtgttgcacacaatattgatgctttctgcattacaccgccttatcagcccggcgctctgcgcggcggtacacatgtgcatgtgttcagcccggacggggaatggctgagtttcacttataacgaccatgtgctgcatgagcgggatccggcgctggatctgcgtaatgtggcggtggcggttccgctgcatccggtatgtaccgggaaacatcacccgcgtgaatatgacggggagtttttctgctgtgtggtctcgcggacaaccccggcgccgcaacccggcagtgatgaaatcagccgtgcatatgaagagggctggattggtgagcaggggtatctgcgggctgacggctcccgtcagcggcgtgcgattgcgtttatcggggatacccggtcagaaaacgatgaggtgatcccggagattttccgtctcgatctgccggaacggcctgaagattatgccgttgccggcgatctgccgcttgagggaaccgacagcacgatgcctgctccgccggccggtgtcagccagacgcggctgacatttactcatcatcgccggtatccggggctggcaaaacagccgcgcttctggctgcgcagctcaccgcagggcgacaaaattgcgtttctgatgcaggacgatcagggaattgttcagttgtggacgatttccccgctgggcggtgaggtgcatcaggtcacttccggcagtgacagtattgaatctgcattcagctgggacagcaccgggcggtatctgacctttgtccgtaaaggattggtcatggtgtgttgtgctgaaaccggggtatgccgcgcggtgacggcaccatcggcagaaccggtgtcaggggatgcggtggtgttttcaccggataacagccgggtggcatttctgcgccgcacaaacggctggcagcaaatctgggtggcagacaccgggctgtaacggcggcagattactcctgcggcaatggtgccggggcgttatgggcggtttccgctgcttccaggcgttttacccgttccgcaggggatgactcactgttgtctttgccgccggtggcataatcgaccggggccagaagggtatcgaggacagcggagaagggcaggtcaatggcgacaatcggcttcatgacccagccggtttcgtcatcctgcaacatggcgatactgtttttggttccgggatagtagccctctgtcgggccggtccgggtcataatacttgagcagccgctgagtatcgtactcagtcccagcaatccgcttattatcatacatttgcgtgtcataacatgtccctgcatatacagcgggcgggtaccggtaattatttcacccgaccggcgtactattccataaatagagtgtactgagaagtttttgtttttttgtgtgatccggatttccgtttaacggcggaacgtgagtgctgtcaccggaaaatgatcaccggcaaatcgtcaccggtaaaacacgcagatcacaggcaaagggtaccacccccgtggaattgttttaacagaaccggcggaattatctgtcagaaagtgtgactgaatttattgaacagtgcggtttgtcggcgctaatacaatgataatagcaggattattacagccattaccggaggcacttgcgggtaaactgggacgcattactgaacggtgtgaggtaaatgccttgtgctttatgccggccggtgatgtcagttaacagatccaaagtcctcgttatacctttaccccgttatgtacttaccacataacggggatttttttaacggcggctgcaacagtgcggcagatgatcatcaatcatgccgacggcctgcataaaggaataacagataaccggcccgcagaatttaaacctgcgttttttcagtgcttttgccagagcatgggacagcggggtatccgcagggatggtgctgctgtctgtatagtggttaatcagcggcgtgttaccggtgaaattccacaaaaaatcactgaaatcttcaccggcctcctgcatcgccaggtaggcttttgcattactgataatggcattgattttcgcccgctggcggacaattcccgggttttgcatcagtttgtccacatcggcctctgtcatggccgccactttttccggatcaaactgaaagaacgactgccggtaattttcacgctttttcaggatcaccagccaggaaagacccgcctgctggccttcaaggcagatcatctcaaataatttatggttatcacgctcggggacaccccattcggtgtcatggtactgaatatagagcgggtcatcagtaacccaggcacagcgggtctgagcagcggcggacagtgacattgtgttctcccggaagacggctttccggttaatttatactggataaatatccatgtaaacgggtatattaccggtttttcgatccgggcggaaaaagatcggagaagcgctgtatagtccggcggtcagagggtatactgaatgacttttattttattattcattttctcgcgtgcggatccaacatgcaaaagtttgataccaaaaccttccagggtcttatcctgacattacaggattactgggcgcgccagggctgtaccattgttcaaccactggacatggaagtcggcgccggcacttcacacccgatgacgtgtctgagagcgttagggccggagccgattgcggcggcctatgtgcagccatcccgtcgtccgacggacggccgttacggggaaaacccgaaccgcctgcagcactactatcagtttcaggtcatcatcaaaccgtctccggataacatccaggagctgtatctcggctccctgaaagagctgggtattgacccgacggttcatgacatccgttttgttgaggataactgggaaaacccgacactgggtgcctggggattaggctgggaagtctggctgaacggcatggaagttacacagtttacttacttccagcaggtcggcggactggagtgcaaaccggttaccggggaagtcacttacggtctcgagcgcctggcgatgtacatccagggcgtggacagcgtttacgatctggtctggtgtgacggcccgctgggcaaaaccacctatggtgatatctatcatcagaacgaagttgagcaatccacgtataactttgaatacgccgatgtggacttcttattcacctgtttcgaacagtatgagaaagaagcacagtccctgctggcactggaaactccgctgccgttaccggcctacgagcgtattctgaaagcggctcactctttcaacctgcttgatgcgcgcaaagcgatttcggtgacggaacgtcagcgttatatcctgcgcatccgtaccctgaccaaagccgttgccgaagcttactatgcctcccgtgaggcactgggcttcccgatgtgtaaaaagaactaagaggctgtcatgacacaacagactttcctgacggaaatcggcacagaagagttaccgccgaaggcgcttcgttctcttgctgaatcttttgcggccaacctgactgcagaactggccgctgctaacctgactcacggtgatgtgacctggtatgctgcaccacgccgcctggcggtaaaaattgccggtctggcggaatctgccgctgatcgcgaagtggaaaagcgcggccctgctattgcccaggcatttgatgccgaaggcaaaccgaccaaagcggcggaaggctgggcacgcggttgcgggatcactgtcgatcaggctgatcgcatggtcactgacaaaggtgaatggctgctgtaccgcgcggtggaaaaagggaataaagccaaagaattattggcagatatggtcagccgtgcgctggcaaaactgcctatcccgaaactgatgcgctggggtgataaagagactcactttgtgcgtccggttcataccgtcacgatgctgatgggcgcggatgttattccgggtgaagtccttgggataacctctgaccgtgttatccgtggtcaccgttttatgggtgaagcggaatttactatcgcacacgcagacgagtatccggcaattctggaaacccgcggtaaagtgatggcggattacgatgcccgtaaagctatgatcaaacgtgatgcggaaaaagcagcactggcactgggcggcgtggctgacctgactgacagcctgctggaagaagtcacttcactggtggaatggccggttgtgctgacagcgaaattcgaggaaaaattcctcgcggttccgtctgaagcgctggtttacactatgaaaggtgaccagaaatacttcccggtttacgacaaaaacggcaacctgatgccgaactttatctttgtcgccaatatcgagtcttctgacccgtcgcagatcatcgcaggtaatgaaaaagtcgtccgtcctcgtctggcggatgctgagttcttcttcaaaaccgactgcaaaaagcgtctggaagataacctgccgcgcctgagcacggttctgttccagcagcaactgggtacactgcgtgataaaactgatcgccttgaagcgctcgcaggctggattgccggtcagattggcgcggatgtgaatcacgccacccgtgcgggcctgctggccaaatgtgacctgatgaccaacatggtctttgaattcactgacacccagggtgtgatgggcatgcactatgcacgccatgacggtgaatccgaagacgtggcactggcgctgaaagagcagtatcagccgcgttatgccggtgataacctgccgtcaacgccggtgtctgatgctctggcgattgctgacaaaatggataccctggcggggatcttcggtatcggccagcatccgaaaggggataaagacccgtttgctctgcgccgtgccgcactcggcgtgctgcgtatcatcgttgagaaaggttacaacctcgacctggaaacgctgacacaggaagcggtccgcctgtatggtgataagctgacgaacgcgaatgtggtcactgacgtggttgatttcatgttaggccgtttccgtgcatggtatcaggagcagggttatgcgattgatactatccaggcagttctggcgcgtcgtccgacccgtccggcagactttgatgcccgcatgaaagccgtcactcacttccgtacactggaggaagccgctgctctggccgctgctaacaagcgtgtttccaacattctgtcgaagagtgatgatgcactgaatgataccgttctggcatcattaatgaatgcaccggaagagatccgcctggcagcctatgtgactgacctgaaaacgcagctggctccgctctatgcggaaggcaaatatcaggaagcactgactgaactggcctctctgcgtgaagcggtggatgcgttctttgatagcgtaatggtgatggataaggatgacaatatccgccgtaaccgtctgacattattaaatgaactgcgcaacctgttcctgggtgttgcggatatttcgctgttgcagtaaccggtgaaagagctaaaagcccggcaatgccgggctttctttttactgaagtggtttttttatctcagattcaaatacaggcacggatgtgatttttccattacctgaatgatagagttcataagctctgaacttagctgtttcattcattatctcgccatcattaatataggcaagaacatcactatctgcagatatatccaatgcttccagatattttttattgttaaatgcgatttgatttgctttaaccaataaactgcctgtcagattgccatagttattaataccaacaccggatttaacattattcaaactggtaattttggtgatatctgatgacatattccctttgttatggataacagcgctgcctattgccagcattttatgtttgttatcaatatggatattgccgttgttggtaatctggctgttttccaggattgaatccgcatcagttacacggatattacctttgctgccattcatcaggtgtgaattgaccaaatccaacgtcagttgactattcacagcatgttgcttttgtgcatcaccaactgtaatcataccgtgattttttatatcagtgttatttgcactgatatacatattatccgttttaatatggctgcctttgctgatagtcagtttactttttggtgtaccactgctgccgggtaaggcttccaaaccccggactgtatctggtgaatattttactaattcatggccgctgaacatcaccagattgggcgtactgatttcactgttacgaatagtgatgttttcagcaatcacattgaatttgtttacggaagaaaacgcattttcagtggtgttactaatgcgaatgttgctgttatttttactattgtgataacccagtaattctccgtccagagagaatactatttttccgccggtcagtgttaactgatccgcgccggaaacactgcatccgttacaggcaataccgttcgggttagcgataatgagatgggctttttggccatccacatgcatattgccgcgcagttgtgatttttcggttgaaagcacctcgttaataatcatacctgcaccggattcgcggttattaaataccacaccatgcttgccgacgttaaactgatcataggcattataagaaacaccgtgtatgtttgccggtgcgatattgatggtggtggtgttcccctgacggatgacctgagtcctctctgatgatacaggattaacggtaatatccgttgcagaggcgaactgagcgaggaaaagggcactgctgataacggacagctttactatttttggcataaccactccctggttgttgctgaggtataaaatccacgggcaggataaataaagtcgctgacagcagatataaacagagtggttattttttgtcagttttcagcattccgatagcaaataaaaaacataccgtttaccaataagcggataaaaaacagaaatttggctgataaaccggcgaaataaaaataatggggtgaaaaacaaaaaattccggtttctgctcttgacgtttagcctttccggcagtaatatccatcccgctttcggcgagtagcgcagcttggtagcgcaactggtttgggaccagtgggtcgtaggttcgaatcctatctcgccgaccatattaagaaaaaccctgcttttacagcagggttttttgcttttcagcatctgccatttttcctcttctgttactttcaaaaattccgccgcttttttgatatcgctgttttctgttatccgtttaactgcccgctgaaaggatttcatcagacggacggatacatgataaaaaaaacagcggctgctgctgtgatggcgacggcctgtggctgcgcatggggtagcacttacacttcttctccgccggtttctccggcctcctgcgccatactgtcagaggtggtgattaagcagcgtgaattaattgagccctcttatctggcggatgaatttgaaaaaagcattaccggacactgtctgacatcagaacagatggcagaagcggtaatgacactggagtcggtggtgcatcaggccggttttatcacagcacaaatcagtgtgccaccgcagaatgtcagcgacggtaccctgacacttcactatcagcccggttatctgagcggctatcgcgataaagagagcggagatacgcatttcgggctgaacctgattttcccgcagcgggcagacggacagctgaatatccgtgatactgaactgggaatgtcccatctgaatcaattgcccagtctgggggctcaggctgccgttgaacctgatccgcagaaccccggcaacagcatcatcaccattacccggcagaaaaaacgcagcatcagcggctcacttgaaatcagcaactacggtagcccgtcaaccggcagcaggcagataactaaccggctcagtcttgaaaatccgttacagctgtatgaccgcctgtttatttataccctgcgggatatggaccgcgaccattccgccggggtgaaatttatttatggccagtaccggatccctttccggtactgggaatttaccgcaggcggcagttacagtgagcagaagcagcaatacccggtataccggggatcactggactattttacccgcagcaaaacgctggatctgagcttcggccgtaagctccttctgactccggcacatgatctcaccctcagcagcggcatttctgcggtaacccggcatgtcacactcggacatgcgccgctgatattgcctgagcgccggtctgtttactggaataccggactgaatcaccgctggtatctgccggatttcaccttgcagtatcaggtgcagtataagcattcactgaaccgctttggtgcgctgccggtaacagaaaaaaagctgaaaccgacccggcagctgatggcagaaacaacactgacagtaccgttccgccttgccggtcagccgttttattatgaaggcgttatgcgcggctttattaatgcagataaagcagatgagatggattatgaatccctgagtggccgttattcggtacgcggctatccgttttcccacagcatgagcgccgcgcgggcttttatcagccgtaatgaggtggtctggcagcaggtattgccgggacataatctgtatctggcagcagatgccgggctgccgggggcaaaaatttccggaggtgcgcgatctcatcgtctggcgggtacggagatcgggatgaaggggttttataaatcactgagctatcaggtctttgccggtctgccgctgaaagaagcggaacgtgtacgggccttttcaccggcgggaggattttctgtcagtgtcagttactgaggaccggtttgatttcagtacgtgatagtaccgctgtatatcaggcagggtgcggattacagcggcagttgtggcaaaatgtgcaacggaaaacactgtgacagtgatatcagacaaaataatcgcgcagtaattaagcattcagtcacaaaatccggataatttttatcagctgtttattctgtgaacgttttatccggcagctgaataaatgctcagttgtgcacccgttcaaacattttagctgtttttgttatcaaaacgtttgatttgtgtgttttatgtgtagtcatcgtccatagtcaatagtattgactgcctctgtgacagttgatttagtgaagtgtcaaaaaataataaacaaactgaaatttgtggtccggcactgccggacgacagagcaaacacgacattcaacgacaggcggagataatgatgatgagaagcgccaaacgtaagacaggatttgcgaagctgggtattacactggttgctctggcggtatccgccagtgttaatgcggcgggaacgctggttttttgttctgagggatcaccggaagggtttaacccgcagctgttcacttcgggaaccacttatgatgccagctccgtgccgctgtataaccggctggtggagtttaaagccggtaccacagagctggagccgggcctggcggaatcctgggatgtgagcgaagacggaaaaacctatacgttccatctgcgcaaaggggtgaaattccacagcagcaaggatttcaaaccaacccgtgatttcaatgcggatgatgtggtctttaccttcgaccgccagaaaaacccggataacccgtatcacaaggtctccggcggtagttatgaatatttcagcggcatggatatggataaaatcatcgataaagttgagaaggtcgatgacaacactgtccgttttcagctgagccgctctgaagcgccgttcctggcaaacctcgggatggacttcgcctccattctttccgctgaatatgccgatcagatgctgaaagccggtacaccggagaaagtcgacctgaacccgatcggcaccgggccgtttgtgttgcagcagtaccagaaagattcccgtatcctgtataaagccaatgacgattactggaacggcaaaccgaaaattgaccgcctggtcttctccatcaccccggatgcctctgtccgttacgccaaactgcagaaaaacgagtgtcaggtaatgccgtacccgaacccggcagacctggagcgtatgcgtgaagataaaaacattgtcctgaaagagcagccgggcctgaacgtcggctatctctcctataacgtcacgaaaaaaccgctggataacgtcaaagtacgtcaggcactgaatatggcagttaataaagatgccatcattgacgcggtgtatcagggcgcaggccagaaagcgaaaaacctgatcccgccgaccatgtggggctacaacaacagcattgaagactatccgtatgatccggaaaaagccaaagcgctgctgaaagaagcaggtatggaaaacggctttgaaatcgacctgtgggcgatgccggttcagcgtccgtataacccgaacgcccgccgtatggctgagatgatccaggcagactgggcgaaagtcggcgtgaaagccaagattgtgacctatgagtggggcgagtacctcaagcgcgcaaaagcgggcgagcctcagactgtcatgatgggctggaccggtgacaacggggatccggataacttcttcgccacactcttcagctgtgcggctaaagagcagggttctaactactcgaaatggtgtgatcagtcctttgaaaacatcattcagccggcacgtaccacggctgatccgaaagagcgcgccaagctgtatgagcaggctcaggtagtgatgaaagagcaggcgcctgcactgatcgttgcacactccacagtgtttgagccggtgcgcaaagaagtgaaaggctatgtggtggatccgctgggtaaacaccactttgacaatgtgtctatcgaaaaataagtaaaccggaaatgagtgttaccggtctgccgcctcctccggggggcggcaaccctgtatcgaaccgcattgcacggacgacgcagaacacataactaaaacaatattattcatcgtgtgagtataaagggaaagtcctccctttcgtccggtcttatgaccagagcgctgtcagcggccattacaagagaaacagggatatgctgcaatttatcctccgacgggtcgggatggtaataccgacatttatcggtatcacgttactgacgtttatatttgttcatctgattccgggagacccggtcactatcatggcgggtgagcggggaatttcccctgaacgccacgctcaactgatggcggccctggggctggatcagccctactggaaacagtaccttcattatatcaacggtgtcctgcacggtgacctcggcctctctctgaagagccgtcagccggtgtgggaagagtttgttccccgctttaaagccacgctggaactcgctgcctgtgccatgattttcgccatttctgtcgggatcccggtcggggtactggcggccgtcaaacgcgggtcaatctttgatcacactgctataggggtctccctgaccggctattccatgccgattttctggtggggcatcatgctgatcatgctggtgtcggtgaatctcgatctgacaccggtgtcggggcgcttatcggacagtgtgttcctcgacgacagtcagccgctgaccggatttatgctgattgataccctgatctggggtgaggacggcgattttcatgatgcggtgatgcatcttattctgccgtccattgtgctcggtaccatcccgctggcggtgattgtccgtatgacccgttcggcaatgctggaagtgctgggtgaggattatatccgtaccgcccgcgccaaggggctgagccgcatccgcgtgattgtggtgcatgcactgcgcaacgcgctgctgccggtggtgaccgttatcggcttacaggtcggcgtgatgctggccggggcgattctgaccgaaacgattttttcctggcccggtatcggccgctggctgattgatgcccttcagcgccgcgactatccggttgtgcagggcggcgttctgctgatcgccattctgattatcctggttaacctgtgcgtggatttactctacggcgtcgttaacccgcggatccgtcataaaaaataacaggagcgcacaatgtctgagacgacaaatactaccgtgacccgcgcgcctgagccgctttccccgctgcgcgaattctggcactacttccggcgcaacaaaggcgcgctgatcggcctgatctatattctgctgatgctgctgatcgccgtttttgccccgctgctcgccccgcatctgccggatgagcagttccgtgatcatttattacaaccgccggtctggcaggaaggcggctcatggcagtttattctcggtactgatgatatcggccgcgatattctgtcgcgcctgatgtacggcgcacggctttcactgctggtcggttgtctggtggtagcgctgtcgctgctgctgggggtggtgattggcctcgctgccgggtatttcggcggctgggttgatgccctgatcatgcgtatcgtcgatatcatgctggcactgccgagcctgctgctggcactggtgctggtggcgattttcggtccgtcgattgttaatgcctcgctggcgctgactttcgtggcactgccgcactatatccgtctgacccgcgcggcggtgctgacggaagtgagccgcgactatgtgaccgcttctgcggtggcgggcgcaggcccggtgcgccagatgtttgtcaatattctgccgaactgcctggcgccgctgattgtgcaggcatctctgggtttctccaacgctattctggacatggccgcattaggtttcctcgggatgggcgcacagccgccgacaccggagtggggaaccatgctgtccgatgttttacagtttacgcagagcgcatggtgggtggtgaccttcccgggcctggcgattttactgacagtactggcgtttaacctgatgggcgacggattgcgtgatgcccttgatcctaagcttaagcagtagaggtgcagacatggcgttattaacagttgataaattatctgttcacttcggtgaaaaagagatgccattccgcgccgttgaccggatcagctatcaggttgaggaaggtgaagtgctcgggattgtcggggaatccggctccggtaaatccgtcagttcactggcgattatggggctgattgatttcccgggccgggtgatggcggataaccttgagtttgacggccgccatctgctgaccatctcagaaaaagagcggcgcgagctggtgggcgcggatgtggcaatgattttccaggatccgatgaccagcctgaatccctgctataccgtgggatatcagatcatggaagccctgaaagttcaccagggcggcaaccggaaaacccggttacagcggactatcgacctgctgacgctggtcggtatcccggatccgaaatcgcggctggatgtctatccgcaccagttatccggcgggatgagccagcgtgtgatgattgcgatggcgattgcctgccgtccgaagctgctgattgccgatgagccgacaacagcactggatgtgactattcaggcacagatcattgaactgctgctggagttacagcagcaggaaaacatggcactggtgctgatcacccatgacctcgcgctggtggcggaagccgctcaccacattattgtgatgtatgcggggcaggtggcggagtccggcaaggcgtcggatatcttccgcgcgccgcgccatccgtatactcaggcactgttacgggcactgccggaattcgccggtaacaagagccgtctggcatcactgccgggggttgtgcccggtaaatatgaccggcctgagggctgtctgctgaacccgcgctgcccgtacgccacggatttatgccgcagcacggaaccggaactgcgtactgtcggggcgcgtcaggtgaaatgtcataccccgctggatgatgaagggagaccgggccatgagtgaaaccacacagccgctgttacatgtcagtgatctgaaaaaatattatccggtgaagaaaggctttttctcgccggagcggatggtgaaagccctcgacggcgtatcgtttgatctgaatcgcgggaaaaccctggcggtggtcggggagtccggctgcgggaaatcgacactcggccgtctgctgaccatgattgaaaaaccgaccggcggggagctgttctaccaggggcaggatctgctggtggcagataaacatgcggagaaactgcggcggcagaaaatccagattgtgttccagaacccgtacggctcgcttaatccgcgtaaaaaagtcgggcagattctggaagagccgctggttatcaatacctctctcagcgcggcagagcgcaaagagaaagtgctggcgatgatggcgaaagtcggcctgaaaactgagcattacagccgttatccgcatatgttttccggcggtcagcgccagcgtattgccattgcccgggggctgatgctggatccggatgtggtgattgccgatgaaccggtatccgcgctggatgtatccgtccgcgctcaggtgctgaacctgatgatggatcttcaggatgagctgggtctgtcgtatgtgtttatttctcatgacttatctgtggtggaacatatcgcggatgatgtgatggtgatgtatctgggacgttgtgtggaaaaaggtaccaaagcgcagatttttgagaatccgcgccatccttacacacaggctctgctctccgcgacaccgaggctgaatccggcacagcgccgtgagcggataaaactgaccggcgagctgccgagcccgctgaatccgccgccgggatgcgcctttgccgcccgctgccgtcatgcatttggcacctgtactcagttccgtccggagcttaaatcctacggcggacagctgattgcctgtttcgcggtggacagggaagaagaggcaaaaatttccgcataacattctgttttacagtaaattacagaaaaacatgttttaactgaagacaaacagcgataatggagggctccgttatcgctttttgctgtctggcgggtgagattagatcagcacaaagcacaatgatgacgtataatcactgcgtatggcgaaagatgtgataactgaattgtaacgaaaggcgtggaatatgcgtgtaaaagtcagaaagtcactgactatcaaacagatgtcagttgtcgctgcggtgactttggtgacgatcgcactttttatgacgcttctgttatcacatctgatacaacagcggaaagatgattacatcaatcagctttataattcgtcagtacaggtcaggaaaccgctggcagatgccttgttagggtcggacttaaacgcaataaaatcgacgctgataacattgcgggccagcgggattttaggacgcgcgattgtgatgacgccggaaaatgttcaggtgataagcctggattttgccacacaccgtcctattcccggcacagcaaaaatgattttcgggatcccggttgagattaaggttccgctttacgcctacggcgtggcacataccggcaaacccccgcagggttatcttattcttcaggtggatgataaccgcatataccgcttcgcgatgaatgtcgtggcactgatggtgaccagttatctgttactggcgctggtgctggtgatcgcgataagctggtgtattaaccgcctgatcgtgcggccgctgcgtaatatggcccgtgagctgaacagtgatgagcctgcagagcagctcagttgttcagcatatcatgaggatgatgaacttggtttgctggcgaaggggtaccggaaccagctgaacaaacataaaacggagtcatcataaaacttcccggacggtttgctgtctaaacccagacgaatcaaaagggcgtcccggaagccggtcagtttttgcctgtacgtatcgtctgacataacagtatttccggcatcagtggtaaacctcagaagaaggcataccagggattcatattaaaagaggttagcatgcaacgctcttatttacgtgttttactcggtggcgtcctgattgccgtcacatctcagttacacgcagaagcattacagccggacccggcatggcagcagggtaaactggcaaacggattcagctggcagctgcttcagacgccgcagcgcccgaatgaccgcatacagatgcgcctttctgttcagaccggctccatgatggaaaaaccggctgaaaaagggttcgcttacctcatcccgaaagtggtgatgtttaacagccagagcctgaacacacagcagttatcgaacctgctgcgtaatggtataagcccggatatgccgctgccgccggcgattgtttcctatgatttcacactctataacctgagcctgccgaataataatcctgaagtgctgaaagcggcactgagctggatggcggatgtctcaggtcatggaatttttaatcaggaaactgttactgccgctctggccgcgccggattctccggtcgccacttatccgccgaatatcaatgatcctatctggcgtgcccggttaaaaggcaccaccctccaggggtttgacccggtgccgccgcctgcgggcaaaattgatgttgaggcactgaacagtttctatcagcgctggtacacaccggatatggcgacactgtatgttgccgggccggttgataaacgcgcgctggaagacggcatcagcaaagcattcggctctctggaaggtaagcgtcagacaccggtcagtgtcgccacactaccgccgatgaaaccacgctcagtccatgccgtgaatgaaaatcagaaagacgatatgctggcgctggtctgggatctgaactggtcttccgtcaaagattcagatgcactgaaccgctactggttaaatgacctcgcccgtgaggcactttttggtgtattacagcagggcatcggcaagaaaaatgaaaaattcatggccatgaatatggattgccggatgcagtatcagcgtgccagctgtatgctcagcctgcgtgcgccgaatgaaaaaatgccggtgattgtctctgaactggccggtgaactggctgtgctgaaagaaaaagggatttccgctgagaattttgatgcgctgattgccatgaaacaggctcagcttcagcagttgtttgctatttatgcccggaccaccacggatatcctgatcaaccagcgtctgatgtcccagcagagtaatatcattgatattccgccggagcagtaccagcgtctgcgtcaggcgttcctgaataacctgacaccggatgtgctgaacgcagaaattcatgcgattttagaacaggataccgcattcttctttactcagccgaaaggtgagacagaaatgaatgtggatcagctgcgtgctcagttcgataagataatgcatccggagaaagcggttgctgcggcagagaaacaggctgcggcggatgcggaatccgctgagaaagcggcagccgaaaaagcagcggcagaaaaagccgccgcagagcaggccaaagccccggcggtaaccccggaagcggcagcgccgtcacaggaagcgaaaccggcagaaccaaaagcaccggctccggctaaaaaaggcgggcaaaacggcaatgccgagccaccggcggcagataacaacaccgacggtgtcagtgcctgatttcgggtaatggtatgaaataaaaagggtatctttcagatacccttttttaatggctattcatcgtcctgacacaagctgctttccagcagattcatcagccacggccgggtgtccctgttattcacaaagcccgccgccgcgatttttttctgcgggtgatagtaagctgcggttccccagaatcccaaatgataccagagtgtctggccgtcccgctctgtcaccatcaccccgcagcggtaatcttccgcaccgtcatggctgcccggtttcagcatggtttcaagggtgtccggcttgtcaaaaatacggccctcaaacagatttgccataaacaccgccagggcgtttaccgacataatcaacccgccgccgccccagagatccatggtcggactgatggtctccccgtcaatattgccgagatactgatgtgcccggggcggaagacccgccggcgccggttcttccagttcccagtaagcggattccatgcccggtgcatcaaagcgcagcaactgccggaccgcttgtgccagcggcagttgtgtgatccgctcaataatatcgcccagcagcagatacccggtatcggaatagaggaaacagaggcccggtttcatcagcggatagccccggctgacatacaggcggatctgctcatcccgtgtccagagatggccggggtcggcgagcacatcacggatatacttctcatcggcatgatcatacagcccgctgctgtgactgagcagatgctgcaccgtgatggcattcagatcataacccgcctctgtcagccagcggacatactgcggggagagcagcggcgcgaccggtgaactgagactgagcttctgctgttcatacaggcgcagcactgccgccgcggtaaacgttttggtattactggcgatccgcaccggggtatccggggtgaccggcgtgctgtcgtttttgctcagtccgccgtgtgccgcaccgtccggtaattcacacccttcgccggtgaaacagaatgccgtggcaaaaccgtccggctgaacatcctgcagcagggctgataaattccgcgccggcatgattatttcttcgcgtcagcgcgcagtttcgtcacactctgtccgccgacaccccagttgtctgtttccacctcatcaataatcacaaaggttgaagccgggttttttcccagtacatcaacaagtaattgtgtggcaccttcaatcagtttttgcttttgttctgcggtcgcaccttctttggtgatgcggatattgatgaatggcatagaggctcctgatagatgtggttgtctgcaactgtctgaatatcagccggtaacggttcagtatccgttacactgactgatattcataccatattgcagccaaaatctcaggcggttttgtttttttggatatcagtcgcaatccaggcggcagaaaagaggatcaggcgcgcgaagaaatagaaaaaggccatcaggccgataacggaaccaaacgcagcaccggacggggaggccgccatattcggcagcagccaggtcataatggttttcaggatctcaaagcctattgcggccagcagtgtgcctttcagcagggagcggcggctcagcttcatgcgcggcaggatccagagaatccaggtaaacagcagatagttggcaaggatggagatggtcaggccgatcgctgtccaggcgggacgcagccattcgacagcatccaggccgagaaacgcgacaatccgggcttgcgcggcaccggcaattgaggtcagcgagagagtaaccaccagcgccaccagcaggccgatcagcgccaggaaatcccgcagatagcgcaggaacatattctctttcacttcaatatccggctcccactggtcgtggtattgtgcccggatagccatccgcagattgcccacccagttcaccccggaatagagtgccagtgccagaccggttaacccgacggttgcacgctggcggattgcggtatcaatactgcgctcaatagtggcggcgagtgtcgggtcgctgatactgttggcgacaccgcggataagtctggtcagcagttccggattaaaggccagcacataaccggcggcggcaaaagagaccatcagaatcgggatcatggataaaaacgagaaataggtaatcgctgcaccgaacgggctgcccattctgtcattaaagcgggtggcggtgcggatcagatgggcaataaacggaatattgcggatataatttccggctttcacactccatttcagggcttttttcccctgttttaacccttcatcaaaattcttccgcaggggttttaatgatgatgtgctgttgtcatcttccggtgtgttgttttcccgggtcatgtatcctcgcttgttcggaaattgattccgtttaagtttactacaggactcaccggatgaacaattcaggttccggtataacgggcttcagaatttcccggttgattaaccgggataataatatgtaattagccgcgcttatttctcttcagaataattaaaacaaataccaatctataagatgttcacaatatgaataataaatgtgtttttcccggaaataaccggggaatttaccgctgtttgctgataccggttattccgctgcttattaccgggtgtgtttataaaccggaagggccttattttgaagtccgctttcagctgactaattatttcgggcagttaagagcaacagcgttttaatactgtttgccggtttctgttgtcagaaaaccggcagcggtatgattactttaataatgaatccagttccgcctgtgcttcttttaattccgcttcggcttcggccagtttgcgttcgcgtttggcaatcttactgatatcgcctttatcgatggctttctgtaaatcggctttgcgctctgccacttcttttgtccggtcactgacttcatcgcgggcatcatcacgcaggctgtttggtgtgcagtaagtattcacattctgcaaagcccgctccagcccctgcacccggtgtgtattgccgtgagctttggcgtagctgagctgctcctgaattttgctttttttgatgtcacagccattctgcgcactcagcgcggaggtgcttaccagtaatgcacccagagccagtgcagcagttgtaaaacgtgtcatgtttacctcgttatttatactagtcgtcattttatgactatcaataatgacaatggttcattatcacgccgcacagatgaggaaagggcattggttctttcctgccgaaatcaggttatactgagcacttcaatctgtactgatattcttgttccgggtggtgcacacccgaccatctgaggcccttgtatgcttagttaccgccacagctttcacgccggcaaccatgcggatgtgttaaaacacaccgtccagagtctgatcattgaatcattaaaagagaaagacaaaccctttttgtatctggatacgcacgccggtgccgggcgttatcagctcagtggtgagcatgcggagcgtaccggggagtacctggaagggatcgcccgtatctgggcgcaggaatcggtaccggaagaactgaaaacgtatcttgaagctgtcagtgcactgaatccgcgtggtgacctgcgtttttatccgggttcgccgctgatcgccgcacatttgctgcgtgatcacgacaaattaaatatcagcgaactgcatccgtctgatttcccgctgctgcgtaatgaattcagccgtgataaccgtgcccgtgtggtgcgggaagatggctatcagcagctgaaatcgcagttaccgccgttatcccggcgcggatttgtgctgattgacccgccgtatgaactgaaaagtgattatcaggctgtggtgaaagggattcaggaaggtcaccgccgctttgcgaccgggacttatgcggtctggtatccggtggtgctgcgccagcagatcaaacggatggtaaaagatttccaggcaaccgggatccgcaaaattctgcaaatcgagctggcagtgcgccctgacagtgatcagcgcggcatgaccgcatccggcatgattgtgattaacccgccgtggaagctggaatcacagatgaaatccgtgctgccgtggctgcataaagtgctggtaccggaaggcacagggcatacactggttgaatggatcacaccggaataattcgtttccgctgcgggcatgacggcagcgggtgtttatgtattgactgataaatggaacgagccaactatgagcaaacattacgattatattgcaatcggcggcggcagtgccggtattgcgtctgtaaaccgggcagcaatgtacgggcagaaatgtgccctgattgaagcaaaagcgctcggcggcacgtgtgttaacgtcggttgtgtcccgaaaaaagtgatgtggtacggcgcgcagattgcggaagctatccgccagtacggcccggattacgggtttgataccaccatcaatcatttcagctgggacaagctgctggaaagccgttctgcgtatattgatcgtattcaccagtcttatgagcgcgttctcggcaataacaaagtggatgtgatcaccggttttgcccgttttaaagatgcacacacggtggaagtgaacggtgaaacgtacaccgcggatcatatcctgatcgccaccggcggccgtccggttccgccgtccatcccgggcgcggaatacggcattgattctgatggtttcttcgcactgaaagctctgccgtcacgtgtggcggtggtcggtgccgggtatatcgccgtggaactggccggggtgctgaatgcgctgggcagcgaaacacatctgttcgtccgcaaacatgcgccgctgcgtaattttgacccgctgatcacagaaacgctggtcgaagtgatgaacaccgaagggccgtcactgcacaccaactctgtaccgaaagcggttgtgaaaaatgcggacggcagcctgaccctgcaactggaaaacggccacgagcagactgtggattgcctgatctgggctatcggccgtgaaccggcaacagacaatatcaatctggatgtgaccggcgtgaaactcaacgatcgcggttatattcaggtggataaataccagaacacctcagttcctggtgtgtatgcggtgggggataacaccggtgctgtcgaactgacgccggttgcggttgccgcaggccgccgtctctctgagcgcctgtttaacaacaagccggacgagcacctggattacaccaatatccctaccgttgtcttcagccatccggctatcggcaccgtgggtctgaccgagccacaggcaattgagcagtacggcgcggataatgtgaaatgttacaaatcctctttcaccgccatgtataccgctgtcaccagccaccgccagccatgcaaaatgaaactggtgtgtgcgggtaaagacgaaaaaatcgtcggtatccacggcatcggctacggcatggacgaaatcctgcagggctttgcggttgcactgaaaatgggcgccaccaagaaagatttcgataacaccgtggcaatccacccgacagcagcggaagaatttgtgacaatgcgctgatggcacattaattgatactgatgtctgcaaagcaggccgtgacgatgtccggcctgctttattttacgtaatgacaatgacactacaccgtactatgtttaaaaggatgtaacattattccggaggaggatatgacaaaacacacagatgagcagcatcctgtgtccggcgtgaatatcacccgttcaacactgaatttacgcatcaaaccggaagataaaattctgattgatcgcgcagcgcatgctgccggtaaaaacagaaccgagttcgtactggaagctgcgcggcgtgccgccgaagaaacactggcagatttacgggttattgatgtcagtaccgatgtctatcagcagtttattaccagactggatatggcaccacagtccggtgaggcgctgaagaagaccatgctgacgaaggcgccgtgggagaagtaatattgaacttaacggcaccggaacccttgcagcagcatcatgattttaccgtttttcagtcaggtgaggagtcccttaaccattggctgaaaacccgcgcattgcaaaatcagcaatccggagcctcacggacatttgtcgtctgccaccataaccggataatggcctattatgcattatcgacaggcgttattacctgttcacaggcggcgggtcgtttcagacgtaatatgcccccggaaattccggttatcctgccgggacgtcttgctgttgacgaaagcgtaaaaggcagagggatcggacggggtctgataaaagatgccgcactgcgggtcttgcaggcggccgggattgtgggtatccgcggtattgttgtccgtgctctgtctgataatgccagacgtttttatgagcataccggttttatgccgtcaccggctgacccgatgctgctgatgattacattacgggatctgcagctggcaaccggcatctattctgaatagctgacggtcacccgaacttcttcgacatcccctctgatgccgggccgacagatttccggccgggcttttcatagaaaccgggtttatccgcgaccatcgggatataggaaccttcaagtgtggcggatgtaagatagcccccgatgcagcccgatctcagccgctttcagtgattttgccgacaatccggctttaatgcgcagcgcgcagtactcctgtgcggaaggcgcacgttcttcagtaatcagtgtcatgacgttgttatctgtaacagcgggaatttttttgcaatgaccttaaaccattcggcaaattgctgcggatggtcacgcatctcttgtttcaggtcagtgagtgatatccagcgcacggcagcgacctcctgcggattcagggaaaacgggccgttatagtggccggtaaacaggtgatcatattcatgttcagtcagggacggcggaacatccgcacgataaatgatatgtccggcaggccgcagaggacaggtgatccccagctcttcctgcagacggcgctgtgtcgcctgttccagcgattcaccacggcggggatgactgcagcagctgttggcccacaatccgccggagtggtatttgctgagtgcgcgctgctggatcagcagctcacccgcatcattaaacaggaatacagaaaacgcacggtgcagtaatccgagctgatgaacgcggagtttttcgtcatacccgagggtattatcatgttcatcgaccagaatcagttcgtcactcattatatcttttatccggtaaagcggctgaaagatatactgtagcaaatatgcagcggaaagtttgccggaatagtggcataaaaacgccggaatatatctccggcgtttcattatttattttcagagattatttattgcgggcagccaggtaatcctgaagggtgccttccgggaatttcttacagaattcaacaatttttggtgcttctgcaacccctttttctgacagtgccacaaagtcaccgcccgggtattgtgtgtctttgctgatcacccacagggcaaccggcgcccagctttgcgggttcagattaacgaattctttgcaggtcattttatcgggtacctgaatatcagcaggttcagcgagagccactgaggaaaatgcacttgcagcaaccagacacgcggtgacgaaatactttttcatgataaataaacctcgttttttgtttcaggaaatacaacaaatacgttttcaggatagatcaaataacgtcatattcaatatttctctatttttaaagaggaaataataatattaaatggttttttcaggataaaaagtatgagcatgtagatgagactcatatcgggccgggtaacatgattttatgtcaggcccgatatgagtgacgattacggatggtgttccagccagctgacaataaagtcacggatggcagtgatattgttgatatccagctgcggtacagtaacatccagccgtggcttatctgacgcaaacgcaataacaaactcatccagcagtgtctgatacggacggtcagtcacatcgcggaacagggcgattttcggtacggattcccccttgaacccttccaccaggataagatccagctcccgtgtatcaaagcgggcggccagctgcatcagatcaggctccgcgccacccggggtttcggtcatcagtgcaaaccgctcctgactgaccaccagagtctgataagcaccagctttacgcagctcgtagctgtctttccccggggtgtccacatccatatcgtgatgcgtgtgtttgaccaggccgatgcgcagcccgctttcccgtaactgcgggatcagctttttcagcagtgtggttttaccggtgccgctgtaggcagtgacggccagcagtggtgccgggtgcggcaaccggtgctgtttttcccattcccggcactcggcaagggtattgagattaataaaatcaccgggattggcatcaaatgtgacggctttggcgccgattttatccataaacagcagaagtttgcgatcgccgccggtgaggtattctgtcagcggcgtgatcagcgagcggtgacacagcgcaaaggccggatgcgcccgctggtgatcacaggcataagcgcacagggcatcacctttctgctgccagagtttttctgccagatccgccgggaactgcggcacatcacagggtacgaacagcacccagtcgtgcagggcattttcaagaccggcgagcatcccggcaagcgggcccggaaaatccggtaatgtatcggcgaccacccgcaggccggtggcgtgataatcctgcgtattgcggttggcattgataaaaatatcgtctgtctgcggggcgagcagttttacactgtgctgataaagcgggatcccgcccagtaataccagacctttgtcctgtccctgcatccgggtggcccggccgccggcaagaatacagccgctgagttgcatcatcattttcagtttctctgacaatctctgataaatattctgaacttatcttaacaaggattccggtatagtgagcgcgaatatcaatgcaatggtcgttataatcacggataatacgccgcagttattacagcctgccaatatttacgcatcctgacagtcctgttctttccggagcggcggataattggtaatgtgttacgatcttgcttataaggaatttattatgaaatgtcatcgtcttaatgaggttatcgaacttctgcaccctgtctggcagcaacattctgatctgaacctgatgcagatgttacagaaactggctgacgaagccgggtttgagggtgaattatctgacctgaccgatgatattcttatttatcacctgaaaatgcgcggctctgaggcaacagacgccattccgggtctgaaaaaagattacgaagaagattttaaaaccgccctgttacgtgcacgcggcatcatcaaagagtaatgcagacgattaccccgccggttttcacttttcaggatttccggcctgaccgcctgatcgacagcctgagccgttacggtatctggcttgattccggtttgacggaactgaacagctatgaaaaccgcgtatatcagtttacggatgaaaaccgtacccgctatgtggtgaaattctatcgtccggcccgctggaatgaggcgcagatccgtgaggagcacgacctgaccctgacactggctcaggccgggctgccggtcgcggcaccgctggcctttgacggcgacacgctgctgtcacaggacggttatctgttcgcgctgtttccgtcggtcggcggacgggcgtatgagacggataatcttgatcagctggaaagcaccgggcggctgctcggacggctgcatcagataagccgggaacgctgttttgagcaccggccggcgatcggactgcaggaatatctgctgacaccgcgtgaaatcctcgcgcagtgcccgctgatcccgcaggcgcgtcgtgacagctttatcgcgacactggataccctgatccgtgagacatccgcccgctggcacgacgactggcacgccattcgcctgcacggggattgtcatccgggtaatattttatggcgtgatgaaccgtggctggtggatttcgatgatgcccgcaacggtccggcagtgcaggatctgtggatgctgctcagcggggatacggattcgcgccgttatcagctggatattctgctcgatgcctatcaggagttttgtgacttcgatacgcgggagctggcactgattgaaccgctgcgcgccatgcgcatggttcattttttatcctgggtggcacgccgctggcaggatcccgcttttccccgggcatttccgtggatggcggaaggtgatttctggtcacagcagcaatcactgatgactgaacagacagccgtactggcggagcctccgctgacgcgctttctgccttattgattttcaggagagataaagatgaagaaactttggttagcgctgattggatttgcgatgtcattcagtgtctttgcaaacccggtatcgggaaaagagtacaccgaactgagcacaccggtaacaaatcagcctgacgtggtggagtttttctccttctactgcccgcactgctaccagtttgaagaaaacttcaaagtaccggaatccatcagcaaaaacctgccggaaggggcgaaacatgaacgttatcatgttgatttcctcggcggtccgatggggcctgaactgaccaaagcctggtctgtggcaatggcgatgggtgttgaggacaaagtgactccgctcctgttcgaaggcattcagaaaaccggcacaattaaaacgcctgctgatgtccgtgacgcctttatcaaagctggtgtgaccggcgaggattatgattccgccgcgaacagtatctttgtgaaatccctgattgccaagcagcagaaagcggctgcggattacaaattacgcggtgtgccggcagtctttgtcaaaggtaaataccagatcaacaacgccggtctggaagtcaaagatgtgaatgaatacggtaaagcgttctctgatacggtcaattatctgatcaaacagaactgatcacagcatctgtatctccgggaagcaatggcggtaacgccattgcttttttactatccacattaatcaagtgattacaacggcagattatcttgcggcattcgtttataacctattgatttttttgaacgagattcaggcatatcgcgctgcagacagtgatttacatagggttcataaatttacccacaaagttatccacagcttgttattttttatttccagggcaaacccgtcctgttctgagtgcgggaagattaacggctgaggccgataatagtcgtctgacgccgcagtctgtggcatgctacccgcaagaatccatttaatactgtgaaggcaattatggctcagattgcagacaaccctttgattttagtcgatggttcatcgtacctctatcgtgcttaccacgcattccctccgctgactaacagcgccggacaaccgaccggtgccatgtacggcgtgctgaatatgctgcgcagcctgataatgcagtatgaacccagccatgttgccgtcgtatttgatgctaaaggtaaaacattccgtgatgaattgtttgaagcctataaatcacaccgcccgccgatgccggatgatctgcgtgagcagatagcgccgctgcatgacatggtcgtcgcgatggggatgccgctgttatctgtttccggcgtggaagcggatgatgttatcgggacactggcgaagcaggcggcggcagaaggccgcgccgtgctgatcagtaccggtgataaagatatggcgcagctggtgaccccggatatcaccctgatcaataccatgaacaataccattctcgggccggaagaggtggaaaccaaatacggtgttccgccgtcactgattattgattatctggcgctgatgggcgactcctccgataacatcccgggcgtgccgggcgtcggcgagaagaccgctcaggccttattacaggggctgggcagcctggatgatatttatgcagacctggataaaattgccggactgagcttccgtggtgccaaaaccctcgcaccgaagatggaaaccaataaagagatggcatatctctcttacactctggcgaccatcaaaaccgatgtggaactcgattgcacctgggattccctggtactgacggaaccggacttagataagctgcatgcattattcacgcagtatgaatttaaacgctggataagtgatctggaaaacggcggctggctggcgaagaaaagtactcgcagcgcgtcgtcaaaggcagcggtaaccaccgcagtacagaccccggctgcaccggcggtcacgccggacatcagcagcgaaaactatgaaactattcttgatgaagaggcgctgaaccgttgggctcaaatcctgcgtgaagccggtgagtttgcgtttgataccgaaaccgacagtctggataatctctccgcgcgtctggtcgggatgtcatttgcggcgaaagcaggccatgcggcgtatgtgccgattggtcatgattatctggatgcgccggatcagttgctgactgagcaggtgctgcgggtgatgaaaccgattctggaagatgaaaaaatacggaaaatcggtcagaacctgaaatttgatcgtgggattatggaaaattacggtgtggaactgcgcggaatcgccttcgataccatgctggaatcctatgtgctcaacagtgtcgccgggcgtcatgatatggacagcctggccgaccgtcatctgaattacaaaaccaccacctttgaagatatcgccgggaaaggcaaaaagcagctgacgtttaatcagatcccgctggaagaagccgccaattatgcggcggaagatgcggatatcacactgctgctgcatcaggcgctgtatccgcagctggaagctgaaaaatcgctgctgcacgtctatcaggatatcgaaatgccgctggtgccggtgctttcccgtatggaacgaaccggtgttctgattgacgccaatgtgctggcggcacagtcagcggagctgaccgcccgtctggatgagctggaaaaacaggcgtttgcgattgccggggaagagttcaacctctcttcaccgaagcagctgcaaaccattctgtttgaaaaactgaatctgccggtggtgaagaaaactccgggcggtgcaccgtcaaccaatgaggaagtgctggaagagctggcggataaccatgaactgccgcgagtgatcctcgaacaccgcagcctgtccaaactgaaaaccacctataccgataaactgccgctgatggtggatccgaaaacccgccgtgtgcatacctcgtatcaccaggcagtgaccgcgaccggccgtctttcttcccgtgacccgaacctgcagaatattccggtcagaaccgatgaaggccgccgtatccgtcaggcatttattgcccgtgacggctactgcattatggccgcggactattctcagattgaactgcgcatcatggcgcatctgtcacaggacaaagggctgctgaaagcctttgccgaaggcaaggatatccaccgcgccaccgccgccgaagtgtttggtgtgccgctggacgaagtgacggcggatcagcgccgcagcgcgaaggcgatcaacttcggcctgatttacggcatgagtgcatttggtcttgcccgtcagctggggatcccgcgcggcgaagcgcagcgctatatggatctctattttgagcgctatccgggcgtgctggagtatatggcccgaacccgtgaacatgcggcagaaaaaggctatgtggaaacacttgaaggccgccgtctctggctgccggaaattaattcccgtaatggtatgcgacgcaaggcggctgagcgcgaggcgatcaacgccccgatgcagggcaccgcagcagatatcatcaaaaaagcgatgattgccgtggatgactggctgcaaaaagagaacatcgatgcgctgatgattatgcaggtgcacgatgaactggtgtttgaagtacgaaaagaacaacaggctgagatggcagagaagatccgcgggctgatggaagccgcgatgaaacttgatgtgccgttaaaagtagaagcgggggttggagccaactgggacgaagcccactaaggcgtcatccttcggcctgcagcggtgttcgctgcgcgtcacgaaccgggtcacatactgatgtatgctccccggttccttctgcttgctgccttgctgcaaaccgaatgatttagccttagcatccggtatcacattgcccgtactcagagatccgggtcacatactggtgtatgctccccggatttcttcctttgccgccttgccacaaattgaaatctatagcgtaaaggtattggccccggagcgggtctgtcaggcgttttcttcccgcattttcagggttttcttcacttttttctcaatgcgctggcgcttcagtggcgagagatgatcgataaataacttgccgttgagatggtcgatttcatgctgaaggcagcccgcctgtaatccttccgcctcaagggtatattctgcaccgtttatatcctgataacggacagtaacagcggagtagcgttgtgtctccgtataactctccggcagggacagacagccgtccatcatcatcatttcgccgtcgcactgaataaattccggattaatcagcgccatcggctgatcgcggttttcagagacatccacgataatcacacgcttacagacacccacctgcggcgcggcaaggccgatgccccgttcggcatacatggtttctgtcatatccgtgacaaatgttttcagttcgtcatcaaaaaccgtgacgggttgggccgtttcccgcaggcagggatcaggaaaatgccgtaatgtcagtaatgccatagctaactcactaatataaataaaaattatggggagacgtactcccggatgcgctcagactatcataacagtatggtgtgaaaacggcatcatttgtgctgttttgttgctattttgtgcggacagccccggactacctatagatccagatcgcataaatatgtaattaaagtacatttggaaggaatttgacggttttatgacaagctgaatcgtgcgcaatctgaaaaaaaattacaaaaaaggtttttttgtcggcaaatttgcggtaaagttattcgcgtagggtacagaggtaagatgttctatctttcagaccttttacttcacgtaatcggatttagctgaatattagctgctccggtcagacaatgtctgaccggagcattttttttgcataaaaaaacccgctgtcgcgggcttcttcatgagcggatatttcagaggatcactctgcgtcgctttcgctgaaccaggtgtccagtttcagacgtaatttatcaatgccgatttttttcagggcggagaaatattccacctgaatatcgccggtttcactcagatcagtcagtgcatcacgcaccgccatcagctgctttttacgtgcgccgctggccagtttgtcggctttggtcagcagtgccagaaccggtacctgcatagccacagcccattcaatcatctgcatatccaggtctttgagcggatggcggatatccatcagcaccaccagaccgcgcagacagtcgcgcttttgcagatattcacccagcgctgcctgccatttgcgtttcatcgcttccggtacttcggcgtaaccgtagcccggcaggtcaaccacacggcagccctcagtgacttcaaacaggttaataagctgggtgcgtcccggggttttactggtccgcgccaggcttttttgttgtgtcagtgcattcagtgcactcgattttccggcattggagcgaccggcaaacgccacctcgatccctgtatcttccggtaaatggcggatatccggtgcgctgatgacaaaatgggtcgcttggtagttgtgcgttttaatggtcaaaatctgttctcctcaggtcgaaaccgggatgattatagcctaatgcctgttgtttaagaactgtggcagacagattactgtgtctgtttattctcagagcggaaaaaagtaataacaataatcgggctgtgtgtggtaaccgatataatccggaaaaaacaaagtcttcccggtggaaaaaacacggatatttacgcgcaaaaagataaaaaaacagagcggtttattatcggttatacaggcaggtgttattttttatttggcataagttgaatttttcatcaaaaaatgaaatttacgcataaaaatcaatatgatatttatatttacgcgttaaatgcaataaaagcatcagcagaatgaacggttccgtcttattttactaaattacgggctgtgcgcagaatatcatcagtacaaatacgtgaaaaattcttatattaattagttatcccggcagtaaaggtaaattaaagtaaatctgtggcgctcagcgccattgcccattaaaatcggtaagattagtgtcagtttatttcgttgaaaggaattgggaatgttaaaacgtgttttagttacatttgtggcagcctgtaccctcagtgcaacgtcgctggcgttcgcggcggagcagacgcatgttaaatttaccaccaccgcaggcgattttgaaattgcgctggataatgaaaaagcgccgcagactgtggaaaatttcaaacagtatgtcaccgataaattctatgacgatacaacattccaccgtgtcatcccgggctttatggtgcagggcggcggctttacggcggatatgaaccagaaacagacccgcccgccggtaaaaaatgaagcggataacggcctgcgtaacctgcgcggcaccattgcgatggcgcgtaccgcagataaagacagtgcaaccagccagttctttattaacgtagcggataatgcattcctcgaccacggccagcgtgatttcggctatgctgtgtttggtaaagtcgtgaacggcatggaagttgtcgataaaatctcaaaagtgaagacagaaaacatcggtccgtaccagaacgtgccatcgacaccgatcaaaattatttctgcaactatcgtaaaataaaccgtattttcgtgcagactaaggggaatatttccggatattccccgtaagcatgtcaaactccctgatagtctgaataagacgatatctgcctctgcggcaccatgccgcattcgggctattttctctgtccggctgtggtattatagcccgcttcatgaaactgtctgtgcaatcccccggggttgcagggtattgtcaacgtgtgcctgatacagcagtttgaaaataaaaaagataaatatatcagtcggatatagataatcatgctattaattatcgataattatgactcatttacttataacctgtatcaatacttctgtgagttaggtgcagatgtacaggttaaacgaaatgatgccgtcagcctcagtgatattgagcaattatcgccatctcacctggtgatctcaccgggtccctgcacgccgtcagaagccggtatttcactggatgcggtcagccatttcgccggtgaaatcccgatcctcggggtgtgtctcgggcatcaggctatcggccaggcattcggcgcgcaggtggtgaaggcgcgtaaagtgatgcacggcaaaaccacagcaatccatcataatcagcagggtgtgttcaaagggctgaaccgtccgctgaccgtcacccgctatcactcgctggtgattgccccggaaacattgcctgcctcgtttgaggttaccgcatggagtctgcatgacggcaatgtggatgaaatcatggggatccgccataaaaccctgccgattgaaggtgtgcagttccatccggaaagtattctcagtgaacaggggcatgaactcctgaataatttcctgaaatactaatcagttatcgcttattttatccccggttctgttttttcattcgttttgatttgattttttattcatatttggtgattatattttcacttgtggatagatcaggtaaggaacgatgacaaaacagaatgcggttacgcgcggcacttatgatgaagtgatgctgccaatttatgcaccggctgattttattcctgtcagaggtcagggaagccgggtgtgggatcagaacggcactgaatatgttgatttcgccggtggtattgccgtactggcgctgggccattgtcatccggcactgatcgcggccctgaaagcccagagtgaatcgctctggcatgtcagcaatatttttactaatgaaccggcgctgatactggcgcagaagctgataaaacatacgtttgcggaacgggttttctttgccaactccggtgcggaggcaaatgaagccgcattcaaactggcgcgtcattatgcactgacccgtcatcatccttataaaaccaaaattatcgctttccatcacggcttccacggccggacactctttaccgtttctgtcggtggtcagccgaaatatgctgatggcttcgggccgaaaccggcagatattattcatgtgccttttaacgaccttgatgctgtcaaagcagtgatggatgatcacacctgtgccgtggtgctggaacctgtccagggcgagggcgggatcacagctgccacaccggcctttatgcagggcctgcgtgaattatgtgataaacatcaggcgctgctggtatttgatgaagtgcagagcgggatggggcgcagcggcaaactgtttgcctatatggattacggtattgagccggatattctgaccacggccaaagcgctgggcggcggtttcccgatcagtgccatgctgacaaaacaggacattgcacaggtgatggtacccggtacgcacggtacaacctacggcggcaacccgctggcctgtgcggtcggtaatgcggcctttgatctgatcaacgacccggcattgctggcgggagtgaatgagcgccaccagtggtttgcggatgcactgcaatccctgaacagtacatttggtgcatttgcggagatccgcgggaaagggctgctgattggtgccgaactggcgggtatctaccgcgatcagtcaaaaaccctgctgggactggcagccaaaaacggtctgatgctgcttaacgccggtaccaatgttctgcgtttcacgccatcgctgattattgaaaaagccgatgtggatgaagggatgaaacgactggcaaaaaccctgagtgattttcgggaaatgcagtaaacggcgggattcagaaacaaaaaaacaggcgcggatgcgcctgttttggtgataaggacggtccggattaacgggtgccgtataccacgatagttttaccgtgtgcggagatcaggttctgatcttccagcatcttcagaatacgaccgacggtttcgcgggaacatcccacaatctggccgatttcctgacgggtaattttgatttgcatgccgtccggatgagtcattgcatccggctgttttgccaggttcagtaatgtctgggcgatgcggcctgtcacatcaaggaatgcaaggtttccgaccttttctgatgtggtttgcaggcggtttgccatctgcgcggaaaggcgcataaggatatccgggttaacctggataagctggcggaactttttgtacgagatttctgcaacttcgcaggcgctttttgcccgtacccacgctgtacgttcctgtccttcctcaaataatccgagttcaccgatgaaatcaccctggttgagataggataaaatcatctctttgccttcttcatctttgatcagcaccgcaacagaaccttttacaatatagtagagtgtttctgccttttcgccctgatgaataagcgtgcttttggatggatatttgtggatatggcagtgagacaaaaaccattcaagcgtggggtctgtttgtggcttgccgagaaccattcgcgttatcctctgttgttagttattgcaaaccgttgtttacgctctgcaattatataaagtcttagcttatcatattaacttgctgaatttccggcaagttagtttattaaaatagtataataatcctcacggaaagatattgatcttagccatagataaatccttgccgtgtttttagcacaggaaaactgtcctgtcttccactgtctcgcttcagcataataaactatgggatagattgccagcccgtgaatgaaagggtagtctgtcgtgaattatattgatgatgagggtataaaaatggaagcgcgtgtaaagtgggttgagaacatgactttcttaggggaatccgcgtcaggacaccagattacaatggacggtaatgccggtgaaaaagccccgaacccgatggagatggtactgatggcaaccggtggctgcagcgccattgatgttgtctctattttgcaaaaaggccgtaatcaagtcattgattgtgatgtaaaactcaccgctgaacgtcgtgaaaccgcgccacgtttattcactcatattaatctgcattttattgtgaccggccgtgacctgactgaaaacgttgtcgggcgtgccgtgcaattatccgctgagaaatattgctctgtttcattaatgttaggcgaaagtgttaacattacgcatagttttgaagtaaagaatattgaatgattttttgaaatattatttttatttttgaaaataaaccgggtaatacattattacccggtttttttatcgcttgtttatttgttttccctgcaataattgctctgccagcggtgccattattaattccatcgccagccctaattttccgccggggacgacgatggtatttgaggcggaaataaaggagccctgaagcatggataacaaatagggaaaatcgatttttttcaggccgcggaagcggatcacggtaaagctttcatcctgtgacggaatggatttggccgagaacgggtttgaggtatccaccgtcggcacccgctggaagttaatgtgggtgcgggaaaactgcggggtgatatagcggatgtaatcatccatcgaacgcacgacagaatccattaccgcctcccgtgaatggccgcgatcattggtgtcacggactaacttctgtatccactccagattgactatcggtaccacgccgaccagcagatccacatgtccggcaatatcatgttccggcgtgaccacgccgccgtgtaatccctcatagaaaagtacatccgtcccggcaggaagtgcctcgcggggggtgaaggtgccgggcagctgattatagggcacggcttcatcataggtatgcaggtatttgcggcgttcgccgctgccgctttcgctgtactggcggaatgtgctttcgagcaggccaaaatcgttggcttcgggcccgaaatagctgatgtggcggccctgctcgcgggccttgcggatggcggcatccatttccggccgcgtgtaacggtggaaactgtcaccttcaataatggccggaaccgcatccagttgctggaaaattttacggaaagcctgactggtggtagtggtaccggctccgctggagccggtaacggcgataatcgggtgggtccgtgacatgcggcgtttcctccggctgaatcagccgcggaattgtgccgacggcatgatgttgagtgtttcgtgtaattccgaccagacaatcacaatgtcgccgtttttgagttgcgtgtaaagatccgccactttatcactgagtgatttttcatgttcgccgtagtcggtgccttcgcgcagcaccacactttccaggatactttccagtgtttccggcgcgatatcctgccagggaataatcatggtgtctcctttgcggccagatgcggcgcgagccattcagggatgcgctcctccagccataaacgcggacggcgccagctgccggacacaaagccgacatggccgccgtgttcggtcatctggtactccacacacggcggcagttgtgacagatccggcaccacttcctgtgccataaaaggatcatctttggcgtggatgatcagcatcggcttacgtacggctgggagtttcggcagggcactgcagcggcggtagtaatccgaggcatcgcggaagccgtggatccgtgaggtgataatgtcatcaaattcgcggatccgtttaatcgcgcggatatgcagcaggtttgtcggcagtgaattcgggtagcgcaccagtttgcgggtggcattacgtttcagccctttcagcagataccactgataaaaacgggaaaagcctttttccattttgaaagagcacggctccagcatcagcggggcggaaaccacaatacctgcatccactgcggcattctcaccctcttcggcgagataacaggccagcatattgccgccgagtgaataaccgaccgcgccggtcggtactttcccgtaggtatcctgcagccagttcagcagataacgggcatcttcggtttcaccggagtggtaaatccgtctggagcggttcggctcgccgctgcatccgcgaaaatgcataacaacacccagccagccctgacgggcggccgcagccaggataccgtgcgcatacgggctgcggaaactgccttccagcccgtgaaagatgaccagccgtggtttatggcgtgcggtatcgggatcttcgctccatgcaagatcaataaaatcatcatccggcagtgtcaggcgctgccagaatggttttatcgtcggtttccggcggaaaatccggggcagcaacgtttgcaggtgcgggttggttgcccaggaaatcggttgaaaatgactagacatagttagattcgtaatgaaaaaacatctcttgtttaatgaaaaacatactggtaattttccgggaagaaaatgaccacgttgccggattactcatgaccgcacatctttttatctcactttccgtatttatgtttatcgcggcagtcacgcccggccccaataatatgttactgaccgcctccggtgcacagctcggctttcgccgtacgctggcactgatggctggtattatgctcggcatgcagacggtattatacctttcagcctttggtgttgcggctattttactgatttatcccaaattgcatactgctatgaaaattgcgggtagtctttaccttctgtggcttgccaaaaaactggctaccgcaccgtatcaggagcttaatgaaccgcaggtcagtaaggccgtcacctggtatcagggggcgctgttacagtttatcaatcccaaggcctggctgatgggactgggggcggtcggcagttacagcctgagcggtgatgcgtatatgctgtctgtcggagtgatgagtattgtgatggtctctgtgaatctggttgccgggcttatctggatcggattcggtgcctttatcggcctttttctgcgcagccgcaatgcctggttcaccttcaatattgtgatggggttactcaccgccgcctgtgtgccgctcatctggcttgaatagcagacataatataacctgcggaacaaaaacagaagctgaatgaaaaacagaccgcattgcggtctgtttttttatcgctgcagcgaaatcagcttaaatccacattcttactgccgaacagcagggtaaacaggaatccggccagataggcgacgagtaacccgccggtatagaccgccatccccatgaagataccactgtcggatgtcatcaccggaatggcgataatccccgatggcccgaaaacggtattcagcccgaccggatagccgaaccaggcgacaagcccgataaagaacccgccggctgcaccaccgcagcaggcagtgataaacggcttcacgcgcggcagggtcacgccgtagattagcggttcgccgatgccgaggaagcccgggataattgctccccggatttgattacgcagcaccgagtcttttttcgcgcggacatacagtgccagcgcagcaccgacctgaccggcacccgccatggcgaggatcgggaacagggagttaaaaccctgagtgccgaccagcgcggtatacaccgggataaagccctggtggataccaaacatcaccgctatcaggaacagaccggcgagaacagcagcgccgaacgggttagcgttaaggtgcataaacagccaggacatgccgtcaaacagccagacgccgaccggcataatcacaataaaggtcagtgcgcccataatcagcagggtgatggcggaggtcagaatgatatccaggttagcagggataaaacgccgcacctggcgttcgacccatgcaccggtgatggtggcgatcagaataccgataatgttaccgcgcgggtcaatgccgtgaccgaagaatgtttccataccggagtagaaacctttggtcgcctgcggatcataaccgaggataaacagcgccgcgatgattgcaccattgacaccggatccgccgaaggctttctgcgcgttatagccgatcaggatccccataaaggtaaacagccctttgccgaagaccttcatgtaactgagcacttcgaccagtgtgccgttcggggacggatttccggtgacccagagcgattcaaacagtgtggcaaagccgagcagcagacccacaccgataaacccgggaatgagcggggtaaaaatagtggcgaatttggcgagaaaacgctgtaccgggtttgtttgtttttctttcagatgctgcttctgatcagcggcaatctctttcaggctgcggctgtccggttcactgcccggtacatgctcatccagatatttctgcatcagctctgcggcggtttgtgctttgcccggccccagcacaatctggaactgctcatcactttcaatcacacccagcacgccctcaatttttttgatggcgattttatccgccagctgtgtgttgttcagtgtcagacgcaggcgggtcatacagttaccgctctgtgccacgttacccggaccgccgatggcatccagaatctgtatgatggttgactgattgattttggccatggtgattaccttgcgttaagagtgcgccgcgccggtcagcgcgtcacggataaacccctgatgctgtgccagcagggctttggcgtcaccggcactcagctgtgccaggatcatcacgatggcggtcttgcagtgtccgtcacaggcggcaagggcttgttctgcggtcgctctgtcacattccgttgcggccatcacaatacgtttctgccgctcaaccagtttggcgttggtcgcttccacatccgccatcaggttgccgtacactttcccggagcggatcatggcgccggtggtgatcatattgagtatcagtttctgggcggtgccggctttcatgcgggaggaaccggtaatgacttccgggccgaccaccggtgtgatggcgataccggccagacggctcatttcactgtccggattacagctgacagcggctaccgttgcaccgagtgacagtgcgtattccataccgcccagcacatagggggtacggccgctggcggcgatcccgactaacacatctttttcattgaaattcagggctttcagatcactcaccgccagttcgcggttatcttccgcattttcaacggctttcaggatagctttgtgaccaccggcaatcagaccgaccacctgctctgccggggtgccgaaggtcggcggacactcactggcatccagtatcccgagacggccggaggtgcccgcgcccatataaatcagccgtccgcccaggcggaatgcctgtgccaccgcatccaccacctgtgccacctgcggcagtgttttttccacggcaagggccacggtctggtcttcgcggttaatcacccgcagcatatctaatgtcggcaggctgtcgatatccgcgcttgccgggttgcggctctcggtaatcattgaggttaagtcaatcttcatgcgtgatcctttgtataagatataatcgcatgctagagaattaaatattctttttgtgtgagaattatcacagagcaatctattcaactatgatgctatagcaggaatagtttcatttcccatcatcattttattttttatatttaattgaatataaatgtattttttattagtcagatacgtcctttatcaggaataattcgtcattttagttaaaataatttattccttttttattctccgcagaaggaaaacaggtacacatggcgatcctgacaaaaatcagctgggtaaaagcagagctggcgaccaatcagcagcatattgccgatttcatcctggcgcagccggaagaaaccgtgacactttcctcccaggtactggcggagcgggtgggcgtgagtcagtccgctatagtgaagtttagtcagaaactgggatttaagggttttccggcactgaaagtcgctatcagcgaagagattggccgcaaccgggtgctggcagctaatcagcagcaggcgctgcataaccggatagaagcacatgatccgctgctggtgatcgcgcagaaactggcacaggaaaagcagaattccattacggaaaccacacggcggctcgattttgaacagatggcagagattgtcgcctgtctggataatgcccgctgtattcaggtcgccggtatcggcggctccgggctgacggcgaaagatctggcctataaacttcagaaaatcgggctgatgacactggcggaagccgatcaccatatccagatcgctttttcccagacgctgaccgaaaaggatgtgctggtggtattgtcattcagcggcaaacgcaaggatatgctggtcaccgccgccacggcgaaaaaacagaatgccacgctgattgcgattaccgggaaccgtcagtcaccgctggcaaaaatggcggattatgtgctggaaacggtcgcggaagaaaacgagtggcgcagttcgtctatttcctcacggacggcgcagaatacagtgacggatctgctgtttatggcgctgttacagcggcgggaagagcaggcgcggcggctggtgatcaatgcccgcaccatgattaacagcctggacggctgataagaaaagagagcggcaggggccgctctttatcatttactgattttcaaaggcctgtgtcatggcttcgaggttttcctgaatctccatccaggccatttccgcctcttccagctcagctttgaactgcgcctgttcctgaaggcaggtgttcagctcggctttgcgggactgatcatacaggccgctgtcaccgagtttttcctcaatcacggcaatggcgtccgataaccggctcatggttttttccagtttctcagattctttgcgcagcggctgagtctgctggcggaattccgcctcacggcgtttctgctctttgcgatcctgcgcggtgacggtatttttttcctcgccgttttccgccgccggctccgcactctggcgcatctgtttctgactgtctgccagccagcgctgataatcatccagatcgccgtcaaacggctcgacctgaccatcatgcaccaggtacagatcatcggtggtggatcgcagcaggtgacgatcgtgggaaaccacgacgatcgctccctcaaattcgatcagggcttcggtcagtgcctggcgcatatccagatccaggtggtttgtcggttcatcgagcagcagcaggttcgggcgctgccagataatcatcgccagtaccagacgcgctttttccccgccggagaaacgaccggtgttgtcggtcacctgatcacctttgaaaccataaccgccgaggtaatcacgcagttgctgttcagtctgatccggcgccaggcgcaccatatgttgtaacggggattcatctgcgcgtaaaaattccagctgatgctgggcgaagtaacccagtttgatacctttggcgagaccaattttgccctgtaacggctccagttcaccggcgagcattttaatcagggtggatttacccgcgccgttacggccgagcaggccgatacgtgaaccgggcaccaggttcagtttgatattatccagcaccactttctcaccgtacccggcgctgactttttccattttcagcagcgggttcggcagtgcttcaggcgggcggaaactgaaacggaacgggttatccgccagtgccggggcaatcagctccatgcgttccagcatcttcagacggctttgtgcctgcttggctttggtcgcctgagcgcggaaacgatcgacatatttctgcagatgtgcgcggcgtaactgctgactttcatactgtgcctgctgctgggccattttctcggcacgctgcacctcaaaggaggagtagttaccggtgtattcaaacagaccgttttgttcaatgtgcaggactttatcaatgatcggatcgaggaaatcgcggtcatgggagatcagaatcagagtgccgggatagctcttcagccatttttccagccagatcaccgcatcgagatccaggtggttggtcggttcatcgagcagcagcagatcagagcggcaaatcagtgcctgtgccaggttcaggcgcatccgccagcccccggagaaggcccgtaccggggtgtccagctgttcctgtgagaatcccagcccgtgcagcagtgtggcggcacgggaacggatggtccaggcatcgagggtgtcgagctgaccgtggatcacggcaatggcgtggccgtcattctgttcattcgcctgctgtaattttgcctcaagctcacggaattcgcggtcaccgtcaatgacatactcgatcgccggttcatccagtgccggggtttcctggttaacccaggccatggaccagtttcccggaaatgacacactgcctgcttcggcctgtaattcgcccttaagcagcgccagcagcgtggatttaccgcagccgttttttcccaccagtccgactttctggcccggattgatggtggccgttgcgttgtcgagcagaacacggacgccgcggcgaacctgaagtgaagagaaaacaatcataaatatcgatagggtaagtaattgagagtaaaattaatgtaattcgtgcgttgtcagcagcaaatcacccgtcagcaggcgaggagtatcgttgcagcgggcatagtagcgaaaatcacaaagattctcacgtttttaagaggaagtgatgataaataatccgactatattactgatttacgcccatccggaaccgcatcactccatcgccaacaaggcgcttatctctgcggcgtcggaactcgggcatgtgacggtgcatgacctgtacggcacctatccggacttttttatcgatatccgccatgagcaggaactgctgcggcagcatgacatcattgtgtttcagcacccgctgtacacttacagttgccccgcgctgctgaaagagtggtttgaccgcgtgctgacccgtgatttctccggtgaacagggcggcagacagctgtccggcaaatactggcgccaggtgatcacaacaggggaaccggcggaagcttatcagcacggcggctataaccgttttccgatcagtgagttactgagaccgtttgagctgacggcggcactgtgtgaaatgcactggctggcaccggttattctctatgccgcacgccgccagggaaaagccatgctgcatgagcaggcgcaggcgtattgtgactggctgcgggcaccgcaactgaccggagggcgtaaaaatggagccagctgacggcaacctgctgcatgcaggtattgtgtttctcgcggcagccgtggtgatggtgccggtggcgcagcggctgcgtatcggcgcggtactgggatatctgctggcggggattgctatcggcccgtgggggctgggctttatcaagaacgtcaatgagctgctgcacttctctgagcttggtgtggtgttcctgatgtttcttatcgggctggagctgaatccgcgtgaactgtggaaactgcggcgatctattttcggtaccggcaccgcgcaggtggtgttctccgccctgatcctcggggtgctgctctggctgacggatttctcctggcaggcggcagtggtcggcgggctgggaatggcgatgtcctccacagcgatggcattacagctgatggatgaaaagggcatgaccaacaacgacagcggccagatgggattctcagtgctgctgttccaggatatggcggtgatccctatccttgcggttattcctctgctgggcggggaaacggcgggcagtgactggtatcgcatcggtatcaagattctggcctttgccggactgctgatcggcggacgctatctgctgcggccattgttccggctggtggtaaaatccggggtcagtgaagtctttaccgccgcctcgctgctggtggtgatcggctctgcggtgtttatggagcagctcgggttttccatggcgctcggaacatttatcgcgggtgtgatgctggcggatacggaataccgccatgagctggagatcaccatcgagccgtttaaagggctgctgctggggatgttctttatttctgtcggtatgtcacttaatatcggcgtgctgtggcagtatctgccgcaaattctgctgggtgtgattgtgctggtgagcgtcaaaatgacggtgctgtatctgctggcacatctgacctgccggcgcagcgggcgcttacagtttgccggggtgctcagtcagggtggggaatttgcattcgtgctgttctcggcggcgctggccagccgtgtgattacggatcatcagatggcgctgctgctggtggtggtcaccctttccatgatgaccacgccgctgctgatgcagggcatcgatatgattctggcgcgccgttacaataatgccgaaccgggaacgggcgaaaccccgtttgtggaggataaccacccgcatgtgattctggtcggtttcgggcggatggggcaggtcatcggccgcctgctgatggcgaacaaaatacatccgacggtactggaaaaagatgtcagcgcggtcagtgccatgcgccgttacggctataaggtttattacggggatgcgacaggactcgcattgttgcgctctgccggggcagagacggcaaaggtgattgtcattacctgtgataagccggaagatactatgaccattgtgcagttgtgtcaggagcacttcccgcatctgcagattattgcccgcgcccggggacgggtggaggcacacgagctgcttacacacggcgtaacacagttcagccgcgaaaccttctcgtcagcgctggaactggcgcgcaaaaccctgatcgggctgggcacgcatccggcggaagcacaccgggcgcagcaattattccgcaggctggatatgcagttgctgcgtgagcttatcccgcaggcggaagaggaaatttcgcatatctcccgcgtgaaagaggcgcggcgcgagctggaaaatctgtttgataatgaaatgaaacgggaaaaacatctgccggacagctggaacctgacggaagactcaccgggcagcggacggacagagacaggagcagaaaaatgagcaaccggaaacggtttattgcgggtgcggtatgccctgagtgtcaggcacaggataccctcgccatgtggcgtgaggataatgtggacgtggtgcagtgtgtgcagtgcggccatcttgagcgccgggcggatgcgcatgcggagcagcatgtgcgcaaagatgaacaggtgattggtatttttacaccgggggaataacaggccgctgcttttcacagagaatttgggggaatttgtcccaaaacagatacagtggctgtaaattccgttacaatcggcgcgttaattaaaatcttatcccccgcggatgtgtaggagataccatgaaagtagcaaaagacctggtagtgagcctggcttatcaggtaagaacagaagacggtgtattagttgatgagtctccggcaagtgctccgttagactatctgcacggtcgcggcgcgctgatcagcgggctggaaagtgcactggacggccgtgttgccggtgatgtgttcgacgtcgatgtcggcgcaaacgacgcctacggtcagtatgacgaaaacctggttcagcgcgtaccgaaagacgttttcgtcggtgttgatgagctggaagtcggcatgcgtttcctggcagacaccgatatgggtcctgtgccggttgaaatcaccggtatcgaaggtgacgaagtgatcgttgacggcaaccatatgctggccggtcagaacctgaaattccacgtcgaagttatcggtgtgcgtgaagcaacagcagaagagctggagcacggtcacgttcacggtgaagaaggcggctgctgcggtggtcacgaccacggcgaagaaggcggttgctgcggcggcggtcatggtcacgatcacgaccatggtcacgaacacggtgaaggcggctgctgcggcggtggcggtcacggtaaaggccacggtaacggcggctgcggttgtcactgataacccgcatctgaaccggacaaaaaaagcgcattctgacggatgcgctttttttatacctgtgttttatcagtagtgcggtggcggcacttcttctgacagcggtgccacatttgagcccggagtggctttcaggcgttcggtcagcaggcggagcctttcattcagccgggtgatatccatctgctgctgtgttaccacctgattgagttcctcaatggtcagatcctgaaaggcggttttgctttcaagctgttcgaggcgttgttcaagttccaaaaggtccatcgttttctcctgtctgagacggggattactgtgtaaaagtatgtaatattcctgtgaaatacacttagtgtgagaggatatcttttattggggggttactatgaaacctctttttgctaaggttgtctcagcatcacaaaaccgtgacattatgatgtcgcccggtgacggctgcaaggactctctgacgtgatctgctgtgaggtacgtcctgtaactgttgcaaaacttatggagaaaaggatgaaatcactgtttaaagcgactgttgtcgcaacctcgctggcaatgacattaggtatgtcacaggcttatgcggataccgcgccgaaaaaagaagaagtgaagctgaacagcgcatttaaaaccgcaagtcagcagaatgcttatgcgctgggtgcgtcactgggccgttacatggaaaatgccctgaatgagcagaaatccattggcctggatctggatcgcgatcagatgatggcgggtgttcaggatgcattcaataataaaagcaaactgagtgatgaagagatcaaccagacgctgcgcggctttgaagagcaggtgaaaggtgccgctcaggaaaaaatggcgcgcgaggcgactgaaaacaaagcagccggtgacaaataccgtgccgcattcgctaaagaaaaaggcgttgaaaaaaccaagagcggtgtgctctacaaatctgagaaagacggtaacggcgcatctccgaaagagactgacaccgttgttgttcactataaaggcgcattaattgacggtacccagtttgacagctcttacgaccgtaacgagccgctgactatccgtctggacagcgtaatcaaaggctggaccgaaggtttgaagcagatgaaaaaaggcggtaaagccaaattggtcatcccgccggaagcagcttacggcaccgacggtgttccggggatccctgccaactccaccctggtctttgacgtcgagttactggatatcaaacctgcggccaaataagccctgctgataccggaaactgacaaaaacccgcgccctgttgtgcgggtttttgtttccgcaacgatcaggattatgaaaaatttgcaaaacatccgtgtttttttgtattttttaccagaatttgatcacctcaggcgcaaaacggcctgtttttcgctataacttaacctgcgggtacctgcacagaaccggaagcccgtcatttgctgctttcctgcacccgggaaatccgggtatataattgatacatgatgacagggtaatcctcctcctgcagtgaaagattacagatgagtaaaaccaacgacgttcacacgttacaaagagtggtgtattaaatgtctaacccagtattatttaatgacaatgattcggattacattgtaaatcatccgtttactgaaacggattatgagatcctgaaatcctatgaggcggctgttgatggcctggcgctgctcatcggtgagcactgtgaaatcgttctccactcactggaagatctgaagcgctcagcggtgaagatcgcaaacggtcatcacaccggccgtaaagtcggttccccgattaccgacctcgcgctgcgcatgctgcacgacattacagatgaagactgcagcacctcgaaagcctatttcacacgggcgaaaaccggggcactgatgaaatcgctgacgattgctatccgcaataaatcacgccgtatcatcgggctgctgtgtattaacatgaacctggatgtgccgttctcccagattgttcagacgtttatcccgaaagagctggcagaagagacctccaatgtgaactttgcctcttccgttgaagacctggtggcacagacactggaacagacgattgaagaagtgaatgccgaccgcaacgtggcaaacaacgcgaagaacaaacaggtggtactgaacctgtatgagaaagggatatttgatatcaaagatgccatcaaccttgtggcggtgcgtctgaatatctccaaacacacggtctatctctacatccgccagtttaaaaacggcgagtaaggcagcacggagcaatgacaccgttatcttactgcctgctggtcaccggcccggcctacggcacacagcgtgccggcagcgcgttgctgtttgcacagcatgtgattgcggccggacaccggattcagtgtgtgtttttttaccgcgaaggggtcagcaacgccaatgtgctgacatcaccggccggggacgaaaccgacatggtacgtcagtggcagcagcttgcccgcgataacggtattcagctggcagtctgtgtggcagcggcgctgcgccgcggtgtaaccgatgccgcacaggcggagtcgctgaaactggcggcagccaatctggcggacggtttttccctcagcggcctgggaactctggcggaagccatgatgacctgtgatcgcgttatccagttttagggagatccggtgaaacgtatcgcatttgttttcagaagtgcacctcacggcagcaacagcggccgggaagggctggatgcactgctggcaaccagtaattatacggaagagattgcggccttttttgtgtctgacggggtacttcagttattaccggaacagacaccggcaaaaatcctcgcccgtgattatatctccaccttcaaagtcctgccgctgtacgatattgatgagtgctactgctgtgcggaggatatggccgcacgcgggttatccccggagacgccgtatatcctgccggtcacctgcctgagtgcggcggaactggcccggaaactggcggcatttgacgccgtggtgtcattttgatctacttacggtgagcaagatgctatatactgtcagccaatcgccatttcgtactgatatccaatcattactgaatctgttatcccctgaggatgacatcctttttaccgaagatggcgtaatcgcagcaacggaaggtaacccgttgttgcaggcgcttattcagtcgggtcatattccctgtgtgttgcgggaggatgccgaagcacgcggtttattaccgttcctttcgggcaaagtgagaatcacagactatactggttttgtggagctcacggtcacacacacgcaacattttgcgtgggaatagcaaatatcattgtatatttcttgacaccctgttgcgtcagcaataaaatttcgcgtcctcgtgttttgtctttgacagatacgaggcacaaatccgtgtttacgaagcaaaaaaccaggagctttttttataatggcaacgattaatcagctggttcgcaaatcccgtagctcgaaagttgtgaaaagcaacgttcctgcactggaagcatgcccgcaaaaacgtggcgtatgtactcgtgtatataccaccacacctaaaaaacctaactcagcactgcgtaaagtatgccgtgtacgtttaaccaacggttttgaagtttcttcatacatcggtggtgaaggtcataacctgcaggaacacagcgtgatcctgatccgcggtggtcgtgttaaagacttaccgggtgttcgctaccacactgttcgcggcgcactggactgttccggtgttaaagaccgtaaacaagctcgttctaagtacggtgtgaagaagccaaaagcttaatggttctccgttaagtaaggccaaacatttatcgcattaatgtcaaataaactcattgagttttggacaaccctgaattaacaacggagtatttccatgccacgtcgtcgtgtaattggtcaacgtaaaattctgccagatcctaagttcggatcagagctgctggccaaatttgtaaatatcctgatggtagacggtaaaaaatctaccgcagaatcaatcgtatataccgcgcttgagaccctggctcagcgttcaggtaaagagcacctggaagcattcgaaatcgcactggataacgtgcgtccgactgtcgaagttaagtcccgccgtgttggtggttctacttaccaggtaccggttgaagttcgtccggtccgccgtaatgcattagcaatgcgctggatcgttgaagctgcccgtaaacgcggtgataagtccatggctctgcgcctggcaaatgaattatccgatgcagctgaaaacaaaggcactgccgttaagaaacgtgaagacgttcaccgtatggcagaagctaacaaggcgttcgcacactaccgttggtaatcaaaccgtagtgaattgtgtatagggtagccgtaaggctgcccgaccaaattaaacgaacgtccaagagagaggaaaaaatggctcgtcaaacacccatttcacgttaccgtaatatcggtatcagtgcacatatcgacgccggtaaaaccaccacaacagaacgtattctgttttatacaggtgtgaaccataaaattggtgagacccacgaaggttcagcaacgatggactggatggagcaggaacaagagcgtggtattactatcacctccgcagcaaccactgcgttctggtccggtatgggcaaacaatttgaaccacaccgcatcaacatcatcgacaccccggggcacgttgacttcacaatcgaagtagaacgttccatgcgtgttcttgatggtgctgtaatggtttactgtgccgttggtggtgttcagccacagtctgaaaccgtatggcgccaggcaaacaaatatcatgtacctcgtatcgcgttcgttaacaaaatggaccgtatgggtgcaaacttcctgaaagttgttgatcagatcaaaacccgcttagcggctactccggttcctcttcagttagctatcggcgctgaagaatcattcaccggtgttgttgacctggttaaaatgaaagcgattcagtggagtgaagaagaccagggcgttaccttcgtctacgaagatatcccggcaaacatgcaggaattagctgctgaatggcaccagaatctggttgaagccgcagctgaagcctcagaagagctgatggaaaaatatctcggcggtgaagaactgactgaagctgaaatcaaatcagcattacgtcagcgcgtactggcgaacgaaattatcctggtaacctgtggttctgcatttaagaacaaaggtgttcaggcgatgctggatgcggttgttgagtacctgccatctccgacagaagttcctgcaattaaaggtattctggacgacggtaaagataccccggctgagcgtcactcttctgacgaagagccgtttgcatctctggcatttaaaattgcaaccgacccgttcgtgggtaacctgacgttcttccgcgtgtactctggtgttgttaactccggtgataccgtactgaacccggttaaatccaagaaagaacgtttcggccgtatcgttcagatgcacgctaacaaacgtgaagagattaaagaagttcgcgctggtgacatcgcggctgctatcggtctgaaagacgtcactacaggtgatactctgtgtgcgattgatgcaccaatcatcctggagcgtatggaattccctgagccggtaatctccgttgcaatcgagccgaaaaccaaagctgaccaggaaaaaatgggtatcgcactgggccgtctggcacaggaagatccatcattccgcgtatcaagtgatgaagagactaaccagactatcatcgccggtatgggtgaattacacctggacgttctggtcgaccgtatgcgtcgtgagttcaaagttgaagcgaacgtgggtaaaccacaggttgcttaccgcgaagcaatcactatgaaagtgactgatatcgaaggtaaacacgctaaacagtccggtggtcgtggtcagtacggtcatgttgttatcgacatgtacccgctgaacaagaaagatgccgaaggcgtcaacatggaatacgaatttgtcaacgaaatcaaaggtggtgtgattcctggtgaatacatccctgcggttgacaaaggtatccaggagcagctgaaatctggtccgttagcaggctaccctgttgttaacatgggtgttcgtctgcacttcggttcataccatgatgttgactcctctgaactggcgtttaaactggcagcatctctggcgtttaaagacggcttcaaaaaagcgaaaccagttctgctggaaccaatcatgaaagttgaggtggaaacaccggaagactacatgggtgacgtcattggtgacctgaaccgtcgtcgcggtatgatcgaaggtatggatgacatgcctaccggtaaaatcgtccgtgcgcaagtgccactgtctgaaatgtttggttatgcaactgacctgcgttcacagactcagggccgtgcttcttactccatggaattcctgaagtataatgaagcgccaaacaacgtagctcaggctgttattgaagctcgtaatgcaaaataatcggtaacttaccggtttaactcgttaatttcagtcccttctcacagtgaagaagggacttcataaggaatagagtcgtgtctaaagaaaaatttgaacgtacgaaaccgcacgttaacgttggtactatcggccacgttgaccacggtaaaactaccctgactgctgcaatcaccaccgttctggcaaaaacctacggcggtaacgctcgtgcattcgaccagatcgataacgcgcctgaagaaaaagcacgtggtatcaccatctctacttctcacgtagagtacgatactccgactcgccactacgcgcacgttgactgcccggggcacgccgactacgttaaaaacatgatcaccggtgctgcacagatggacggcgctatcctggttgttgctgcaactgatggccctatgccacagacccgtgagcacatcctgttaggtcgtcaggttggcgttccttacatcatcgtattcctgaacaaatgtgacatggttgatgatgaagagctgctggaactggttgaaatggaagttcgtgaacttctgtctcagtacgatttccctggcgacgacacgccaatcgttcgcggttcagcgctgaaagcactggaaggcgagccagagtgggaagctaaaatcgttgaactggcaggctacctggattcttacatccctgagccagagcgtgcaattgacaagccgttcctgctgccaatcgaagacgtattctcaatctccggccgtggtaccgttgttaccggtcgtgttgagcgcggtatcatcaaggttggtgaggaagttgaaatcgtgggtatcaaagatactgcgaaaaccacctgtaccggtgttgaaatgttccgcaaactgctggacgaaggccgtgcaggtgagaacgtcggtgttctgctgcgtggtaccaagcgtgaagaaatcgaacgtggtcaggttctggctaaaccaggttcaatcaaaccacataccaaatttgaatcagaagtttatattctgagcaaagatgaaggtggtcgtcatactccattcttcaaaggctaccgtccacagttctacttccgtaccacagacgtaacaggtactatcgaactgccggaaggcgttgaaatggtaatgccgggcgacaacatcaaaatgatcgtcaccctgatccacccaatcgcaatggacgatggtctgcgtttcgcaatccgtgaaggcggccgtaccgttggcgcgggtgttgtagcgaaagtgatgggttaattacggatgtaataatcctaaaaagggcatcatttgatgccctttttctgcgttgttttatgaagaacctatctcatcactagttgatcatcaactactggtgagataggctctcacgcaacgaatggtgagtatctcgaagaatacgaaactcatgctggattatgacgccaagtcagatacaattgcatctgtccctaattttggtctgatttgttttgcaacagcgaggcagtccggctgacttttttatttcatggttacaggttggtttatgagtgcgaatagcgaagctcaacaaaacggccgtggtgctgacattgccaaatggttagtggtcgcagttctgctgatcgctgctatcggcggtaactactacttccgcgaatttaatctcgcgctgcgtgcgctggcagttgttgtcgtcatcgcattagccggtggtattgcactgtggacaacgaaaggcaaagcgacactgacttttgcccgcgaagcacgggttgaaatgcgtaaagtgatctggcctacacgtcaggaaacactgcatacaacactgatcgttgcggcagtcacagcggttatgtcgttagtgttatggggccttgatggtatccttgtccgtcttgtttcctatataacatccttctgaggttctaaagatgtcggattctcctaaaaaacgttggtatgtcatccaggctttctccggattcgagagccgggttgcgcagtctctgcgtgaacatatcaaaatcaacgggatggaagattcatttggcgaagtcatggtgccaacggaagaagtcgtcgagatccgcagcggtcagcgccgcaaaagtgagcgcaaattcttcccgggctatgtcctggttcagatggcgatgaacgatgcatcctggcatctggtgcgtaacgtaccgcgtgtaatgggattcatcggcggaacatccgatcgtcctgcaccgatcagcgataaagaagttgatgcgattatgaaccgcctgcagcaggtaggtgataagccgcgtccgaaaacgctgttcgagccgggcgaaatggtccgtgtttccgatggtccgtttgcagactttaacggtgttgttgaagaagtcgactacgagaagagccgcctgaaggtatcagtctctatttttggtcgtgcaacaccggtcgaactggatttcagtcaggtcgaaaaaccgtaacggttttttttccgggcttgcaaagggcgggaaatttatctacaatttcgcgccttttgtttttcaggggttcgcgttttcacgcgggcctgtattcataggggagccgggataaccggcgctattacccacattgaggattttttaaatggctaagaaagtacaagcctatatcaaactgcaggttgcagctggtatggcaaacccaagtccaccggttggtcctgcactgggtcagcagggtgtgaacatcatggaattctgtaaagcgtttaacgccaaaacagacagcatggaaaaaggtttaccaatcccggttgttatcaccgtttatgctgaccgttctttcactttcatcactaaaactccgccagcggcagttttactgaagaaagctgcaggtctgaaatctggttccggcaaaccgaacaaagagaaagtaggtaaaattacttctgctcaggttcgtgagattgctgagactaaagcagcggatatgactggtgccgatgtagaagctatgatgcgttctatcgaaggtactgctcgttccatgggcctggtagtggagggttaatcgatggctaaactgaccaagcgcatgcgcaatatccgtgaaaaagttgatgctaccaaactgtacgacatcaatgaagccgtagccctgctgaaagaattagcgactgctaaattcgttgaaagcgttgacgttgccgttaacctgggtatcgatgcacgtaaatctgaccaaaacgttcgcggtgcaactgtactgccaaacggtaccggtcgttctgtccgcgtagctgtgttcgcacagggcgctaacgctgaagctgctaaagctgcaggcgcagaactggttggtatggaagacctggctgacaaaatcaaagccggcgaaatggacttcgacgttgttatcgcatctccggatgcaatgcgcgttgttggccaattaggtcagatcttaggcccgcgcggcctgatgccaaacccgaaagtgggtactgtaacgcctaacgttgctgaagctgtgaacaacgctaaagcgggtcaggttcgttaccgtaacgacaaaaacgggatcatccacaccactatcggtaaagtagatttcgacactgataaactgaaagaaaacctggaagctctgctggttgcgctgaaaaaagcaaaaccatcttcagcgaaaggcgtgtacatcaagaaaatcagcctgtctaccaccatgggtgcgggtgttgcaatcgaccagtctggtctgactgctgctgcttaatatctgcggatagtaagcgctttacattggggtcaggtttctgtagaatctgacgcccaatgtttgctgtatttgatttagtgaaattatcacacaatcaggcacagccagaatttcggttggagtccggccttttccgggccccgtccaagaccgcaggtgtaagtgattacttaattttcctgcgtagacggtgacagagccacaagaattttattcgagtattctgctcaccgtgttttagcgctctccaccttccggtgctgagtgaagtgagttccggggttgtattactcggctaaaccaggagcaagaagctaatggcattaaatcttcaagacaaacaagcgattgttgctgaagtcagcgaagttgccaaaggtgcgctgtctgcagttgtcgcggattcccgtggtgtgactgtagataaaatgaccggtctgcgtaaagcatgtcgtgaagctggcgttactgtacgtgtagtacgtaacaccctgctgcgtcgtgctgttgaaggtacctcttctgagtgcctgaaagacgtattcgtcggtcctaccttgattgcattttctcatgaacatccgggcgctgctgctcgtctgttcaaagaattcgcgaaagcgaaccctgcattcgagattaaagccgcagcctttgaaggtgagttaattgcagcgaaagatatcgatcgcttagcaacactcccgacttacgaagaagcaatcgcgcgcctgatggcaaccatgaaagaagcctctgcaggcaaactggttcgcactctggcagcgttacgcgatcagaaagaagcagcttaattgccctttcttttcttcgttgctttttaacgtataaacttattctgaattttaggaacatatcgtatgtctatcactaaagaacaaatcctggacgcagttgctgaaatgtctgtaatggacgttgttgaactgatcaccatgatggaagaaaaattcggcgtttctgctgctgctgctgtagcagttgctgcgggtcctgctgaagctgctgaagagaaaactgagttcgacgttattctgaaagctgcaggcgctaacaaagttgcagtaatcaaagctgttcgcggcgcaactggtctgggcctgaaagaagctaaagatttagttgaaagcgcacctgctgcactgaaagaaggtgtgagcaaagatgaagctgaaactctgaaaaaatctctggaagaagctggcgcggaagttgaagttaaataagccactttttgcagtagcagcctgaaaatggctgatggctggtgacttattggtcaccagcctttttgcgctaatgcgcatgcgtgtgtttccggggtaacagttgtgttatctgacacccgcaaactctccgaatactttttgctattgacgacttaatatactgtgtttatgactgcgattcgctcgggtagctcggtagtcagcagcgcaatgaaatgatttaagagtaatagcaatgggtattaacagaaaatgttcaattttctgtccaaattagatagttgtagcgactgtccgtccgatacgggcaggccgggtcactgatcaagcgagctgaggaaccctatggtttactcctataccgagaagaaacgtattcgtaaggattttggtaaacgtccgcaagtgctggatgtaccttatctcctttctatccagctggattcattccagaaattcattgaactcgatccggacggtcagaacggcctagaagccgcgttccgttccgttttcccgattcagagctacagtggcaatgctgaactgcaatatgtcagcttccgtctgggtgagccggtatttgacgttaaagaatgtcagatccgcggcgtaaccttttccgcaccactgcgcgtaaaactgcgtctggttgtttacgagcgtgaagcaccggaaggcacagttaaagatattaaagaacaggaagtttacatgggcgagattccgctcatgaccgaaaacggaacgttcgttatcaacggtactgagcgtgttatcgtttctcagttacaccgcagcccgggcgtgttctttgacagtgacaaaggtaaaacacactcttccggtaaagtgctgtataacgcacgtatcattccttaccgtggttcatggctggatttcgagttcgatccgaaagacaacttatttgtccgtattgaccgccgccgtaaattaccggcttcgatcattctgcgtgcgatgaatttcagcaccgaagacattctgaacctgttcttcgaaaaaaccacctttgaaatccgcaataataaactgaccatgaccctcattcctgagcgtctgcgtggtgaaactgcgtccttcgatatcgaagcgaacggtaaagtttatattgagaaaggccgtcgtatcactgcccgtcatatccgccagctggaaaaagacgaagtcagccagattgaagttcctgttgaatatatcgcaggcaaagtggttgcgcgtgattacatcgatgaagcgaccggcgaattaatctgtgcggcgaacatggaaatgtcactggatctgctggcgcgtctgagtcagtccggtcacaaaaccattgaaaccctgttcaccaacgacctggatcacggcgcctacatgtcagaaaccctgcgtgtggatccgaccaacgatcgtttaagcgcactggtagaaatctaccgcatgatgcgtcctggtgagccgccaacccgcgaagctgctgaaaacctgttcgagaacctgttcttctctgaagatcgttatgatctgtctgcggtcggccgcatgaagttcaaccgttcactgggtcgtgatgactctgacggtaccgggatcctgagccagcaggacattactgatgtcatgaagaaactgatcgacatccgtaacggccgcggtgaagtggacgatatcgaccacttaggtaaccgtcgtatccgttctgtcggtgaaatggcagagaaccagttccgtgtgggtctggtccgtgttgagcgtgcagtgaaagagcgtctgtctctgggtgatctggataacctgatgcctcaggatatgatcaacgccaagccgatttctgctgcggttaaagagttctttggttccagccagctgtcccagtttatggaccagaacaacccgctgtcagaaattacgcacaaacgccgtatctcagcattaggcccgggtggtctgacccgtgaacgtgccggcttcgaagtccgagacgttcacccgactcactacggtcgcgtatgtcctatcgagacccctgaaggtccgaacatcggtctgatcaactccttatctgtttatgcacagactaacgaatatggtttcctggaaaccccgtaccgtttagtgcgtgacgatgttgttactgatgaaattcattatctgtctgcaatcgaagaaggtaacttcatcattgcacaggcaaacaccgtattagatgacgacggccacttcgttgatgaactgatcacctgccgtaacaaaggtgaatccagcttattcagccgtgatcaggttcagtacatggacgtttccacccagcaggtggtttctgtcggtgcatccctgatcccgttcctggaacacgatgacgccaaccgtgcattgatgggtgcgaacatgcaacgtcaggcggttccgactctgcgcgctgacaagccactggttggtaccggtatggaacgtgcggtagccgttgactccggtgttacagccgtagccaaacgcggcggtactgttcagtacgttgacgcatcacgtatcgttatcaaggtaaatgaagatgaaatgtatgccggcgaagcgggcatcgacatctacagcctgaccaaatatacccgttctaaccagaacacctgtatcaaccagactccttgcgtatcgctgggtgagccggttgagcgtggtgacgtgctggctgatggtccgtcaactgacctcggcgaactggcactgggtcagaacatgcgtgtggcatttatgccatggaacggttacaacttcgaagactccatcctcgtgtccgagcgtgttgttcaggaagaccgtttcaccactatccacatccaggaactggcttgtgtgtcccgtgacaccaaactggggcctgaagagatcactgcggacatccctaacgtgggtgaagcggctctctccaaactggatgaatccggtatcgtgtatatcggtgcggaagtgaaaggcggcgacattctggtcggtaaagtgacaccgaaaggtgaaacacagttaaccccggaagagaaactgctgcgtgctatcttcggtgaaaaagcgtcagacgtgaaagattcatctctgcgcgtaccgaatggtgtttccggtactgttatcgacgtccaggtctttacccgcgatggcgtggaaaaagacaagcgtgctctcgaaatcgaagagatgcagctgcgtgatgcgaagaaagacctgaccgaagagctccagattctggaagccggtctgttcagccgtatccgttccgttctgatcaacggcggtatggaagctgacaaactggacaaactgccgcgcgagcgctggttagaactggctctgactgatgaagagaaacagaatcagttagaacagctggcagaacagtatgacgaactgaaatctgagttcgccaagaaactggaagcgaaacgccgcaaaatcacccagggcgatgatctggcaccgggcgtgctgaaaatcgttaaagtgtatctggctgttaaacgtcagatccagcctggtgataaaatggcgggtcgtcacggtaacaaaggggttatctcaaaaattaaccctatcgaagatatgccatacgatgaaaaaggtaaccctgttgacatcgtactgaacccgctgggcgtaccatcgcgtatgaacatcggtcagattctggaaacccacctgggtatggctgcgaaaggcatcggtgacaaaatcaaccagatgatcaaagagcagcaggaagtcgcgaaattacgtgaattcatccagaaagcctatgacctgggtaacgacccgcgtcagaaagtggatctgaacaccttcagtgatgaagaagttctgcgtctggcggacaacctgaaaaaaggtatgccgacagcaacaccagtattcgatggtgcaaaagagcaggaaatcaaagcattactgaccctgggtggcttaccgacttccggtcagatcacactgtttgatggtcgtaccggcgagcagttcgagcgtcaggttaccgtcggctatatgtacatgctgaaactgaaccacctggttgatgacaagatgcatgcgcgttctaccggttcttacagcctggttacccagcagccgctgggtggtaaggcacagttcggtggtcagcgcttcggggagatggaagtgtgggcactggaagcatacggtgccgcttacaccctccaggagatgctgactgtgaaatcggatgacgttaacggtcgtacgaagatgtataaaaacatcgtcgacggcagtcatcagatggagccgggaatgccggaatctttcaacgtattgctgaaagaaatccgttccctcggtatcaatatcgagctggaagacgagtaattaccgttgtggctgcccgtggtacacgggcagcaccagtaaatctggtttaagggacaaacagacgaccgtttgtctcacaggtctaactccgacaggagccatttcgtgaaagacttattaaagtttctgaaagcgcaaaccaagaccgaagagtttgatgcgatcaaaattggtctggcctcacctgacatgattcgttcatggtcatttggtgaagtgaaaaagccggaaaccattaactaccgtacgttcaaacctgagcgtgacgggcttttctgtgcgcgtatcttcgggccggtaaaagattacgaatgtttgtgcggtaagtacaaacgtctgaaacaccgtggtgtgatttgtgagaagtgtggtgttgaagtgactcagactaaagtgcgccgtgagcgcatgggtcacatcgaactggcatcaccgaccgcacacatctggttcctgaaatcactgccgtcccgtatcggcctgctgctggatatgccgctgcgtgatatcgaacgtgttctgtactttgaatcttatgttgttgttgaaggcgggatgaccagccttgagcgcagccagattctgacagaagaacagtatctcgacgctctggaagagttcggtgatgaattcgacgcgaaaatgggtgcggaagccatccaggcattgctgaaagcaatggatctggaacaggaagtcgaaaacctgcgcgaagaactgaatgaaaccaattcagaaaccaaacgtaagaaactgaccaagcgcatcaagctgctggaagccttcattcagtccggtaacaaacctgagtggatgatcctgacagtgctgccggtattaccaccggatctgcgtccgttagttccgctcgacggcggtcgctttgcgacttcagatctgaacgatctgtaccgtcgtgtgatcaaccgtaacaaccgtctgaaacgcctgctggatctggctgcacctgacatcatcgtacgtaacgaaaaacgtatgctgcaggaagccgtggatgcgctgctggataacggccgtcgtggtcgtgcaattaccggctctaacaagcgtccgctgaaatctctggcagacatgatcaaaggtaaacagggtcgtttccgtcagaacctgctcggtaagcgtgttgactattccggtcgttctgtaatcaccgtaggtccatacctgcgtctgcatcagtgcggtctgcctaagaaaatggcactggaactgttcaaaccgttcatctacggcaagctggaactgcgtggtctcgcaaccaccattaaagcagccaagaaaatggttgagcgcgaagaagcggtcgtatgggatatcctggatgaagttatccgtgagcacccggttctcctgaaccgtgcaccgacacttcaccgtctgggtattcaggcgtttgaaccaatccttatcgaaggtaaagctatccagctgcacccgctcgtttgtgcggcatataacgccgacttcgatggtgaccagatggcggttcacgttcctctgaccctggaagctcagctcgaagcccgtgccctgatgatgtccaccaacaacatcctgtcaccggcaagcggcgatccgattatcgtaccttctcaggacgttgttctgggcctgtactacatgacccgtgactgtgttaacgccaaaggcgaaggcatggtactgaacggttcaactgaagctgagcgtgtataccgcgccggtcatgcgtctctgcatgcccgtgtgaaagtccgtatcactgaagaagtgaaagacggcgaaggtaatatcaccaagcgtaccagcatgattgataccactgtcggccgtgccatcttatggcgtatcgttccgcgtggtctgccttactcactggttaaccagccgctgggtaaaaaagcaatctccaaaatgctgaacacctgttaccgtattctgggtctgaagccgaccgttatctttgctgaccagatcatgtacaccggttttgcctacgctgcccgttcaggtgcatccgttggtatcgatgacatggttattccggagaaaaaagccgggatcatcgcggaagccgaagcggaagtggcagaaatccaggagcagttccagtctggtctggttaccgccggcgaacgttataacaaagttatcgatatctgggccgcggccaacgaacgtgttgccaaggcgatgatggaaaacctgtctgttgaaaccgtggttaaccgcgacggcgaagaagaacagcaggtttctttcaacagtatctttatgatggccgactccggtgcgcgtggttctgctgcacagattcgtcagctggccggtatgcgtggtctgatggcgaaaccggatggttccatcatcgaaacgccaatcaccgcgaacttccgtgaaggtcttgacgtactccagtacttcatctcaacccacggtgcacgtaaaggtctggcggataccgcactgaaaacagcaaactccggttacctgacccgtcgtctggttgacgtggcgcaagacctcgtcatcactgaagatgactgtggtacgcacgaaggtatcgtcatgaccccggttatcgagggtggtgatgttaaagaacctctgcgcgaccgcgtattaggccgtgtggctgctgaagatattctgaagccgggtactgcggatattcttatcccgcgtaacaccctgctgcacgaaaaacagtgtgacctgttagaagaaaactcagtcgacagcgtgaaagtccgctctgtggttagttgcgaaactgacttcggtgtgtgtgcgaaatgctacggccgtgacctggcgcgtggtcacatcatcaacgccggtgaggcggtgggtgttatcgcggcacagtcaatcggtgaaccgggtacacagctgacgatgcgtacgttccacatcggtggtgcggcatcccgtgctgctgcggaatccagcattcaggtccgtaacaagggtacactgaaactgttcaacgcgaagttcatcatgaactctgcgggcaaactggttatcacgtcccgtaacacagagctgcgtctgatcgacgaattcggccgtaccaaagagagctacaaagtaccttacggtgcccagctctccaaaggtgacggtgaagccgtcaacggcggtgaaactgtcgctaactgggatccgcataccatgccggttgtcagtgaagtgtccggtatcatccgctttaccgacatgcacgacggccagaccattacccgtcagactgatgaattaaccggtctgtcctcactggttgttctggattctgcagaacgtaccaccagtgcgaaagaaatgcgtccggcactgaaaattgtcgatgcacagggtaacgatgttctgatcccgaacactgatatgcctgccgcgtacttcttaccgggtaaagcgattgttcagctggatgacggcgtggcaatcaccgccggtgacacgctggcacgtatcccgcaggaatctgtcggtaccaaggatattaccggtggtctgccgcgcgttgcggatctgttcgaagcgcgtcgtccgaaagagcctgcgatcctggctgaaatcagcggtatcatctcgttcggtaaagagaccaaaggtaagcgtcgtctggtgatcacaccaatcgacggcagcgatccttacgaagagatgattccgaaatggcgtcagctcaacgtgttcgaaggtgaaatggttgaacgtggtgacgtcgtatctgatggtccggaatcaccgcacgatatcctgcgtctgcgcggcgtgaatgccgttgcacgttatatcgcgaacgaagtccaggaagtttaccgcttacagggcgttaagattaacgataaacacatcgaagttatcgttcgtcagatgctgcgtaaagtcaccatcacctctgcgggaagctctgagttcctcgaaggtgagcaggttgaatatgcacgcgtgaaagtggcaaaccgtctgctggagcaggaaggcaaaatccctgcaacctttgaacgtgatctgctgggtatcaccaaagcgtctctggcaacagagtcctttatctctgcggcatcgttccaggagaccacacgcgttctgaccgaagcggccgttgcgggtaaacgcgacgaactgcgcggtctgaaagagaacgtcattgtgggtcgcctgatcccggccggtaccggtttcgcgtaccaccaggatcgtatccgccgccgtcacctggcagaaactgccgaggcagcaccacagcaggtcagcgctgatgaagcaacagctaacttagctgagcttctgaacgccggcttcggtggcagcaaagagtaagtgatacagcaatgtaactgactgaacagccctccttttttaaggagggcttttttgtgcagtacagcaggtaaacgggcatattatgcgcaacgtattgtttatttttatgattttattttctgtcgccggtgtcagccgggcggcggaagtgccttctgattctcaggaatggttactgaaagatgaaccgccggttttgattcaggtaaaagaaccgcaggtgatttttgctccggtggccggtgtgatgcagggggttgcggaactgaacccctcacacggtttttatatttatccgatgaagggcgaattccgtgaattacagtttggtaatgatcgcggttttatcggcagcgaacagctgtcagataaaaaacctaaagtcgtgccgccgctggatacactgaatgaactcaataatccgatttatgattatctgataaccatcagcaacaccaatgtgtttggctcgccggatgaatctaaatcccctgttgccaccctgtttggtgatctgcgttatccggtgctggccaaaatggtcagggaaaaccgggaaggtgaaaaaattgtctggctgactatccgcctggcggacagactggcgtacatccgcctgtcagatgtggaactggacaaagggattccgatcctgacgtatcaccatatcctgaaagacagtgaaaacaggaacttccgccatacctcgaccaccacatccgttgaagcctttaaggcgcagatggattatctgaagcagtccggttaccggacgatctcccttgatgacgtggccggttatctggcgaaggaaaataacctgccgggcaaagtagtggcgctgacgttcgacgatggcctgaaatcggtttaccgctatgcttatccgatcctgaagcagaatgatcagaaagccacactgtttgtaatttcctcgcgggtgaaatcaaaaccgcagaaatgggcaccggacggcttgcagtttatgtgctggccggagctgatgcagtcacgggatgtgtttgatattcagtcacatacgcatttcttacatcggctggataaccgcaaaaacccgattattttcagccgcaaggagcacacgatcctgctggattaccagcgctcacagcgcgtgctggcgaaactgaaccctgaacagcattatctggcatatcctttcggggcatataatcaggatgcgatggatgcagcacagcaggccggtatgacgatggccgtcaccaccattcaggggaaagtccgcctcggtgataatccgtatgcgctgaaacgtctgtatgcactgcgtaccgacccgattgagaaatttgccaccatgattggcaacagtggtccggaagtggtgaataaggatattgttgtcgacagataatcccgtttttatataacaactcacggcctgataataacgattatcaggccgttttttttgtgtgtacattatgaaatcagaaattgcagttcataaggggcggattcataactgaccaggttatcttcaaactcattggcaataaccatccgtggtttttctttgccgtggaaataacgtttcaccatttcagcgtcgatattctcactgagataatgacagatacagcaaagataaaacccggccggtaaacacaccaggttcggagaatcaaaatctggtttctctttcaggtaaatcaggtatttcgacgggtagaaggtttgctcaataatgttttgataatccagcacataggcatactgccgcagataatcgagggactgattttccggtctggctttcatttcagccagccgcagttccatttttgaaatcgggcgatctgccggataacagggaacaaacagacaccagcgttccggtaattcggtagtataaaaagctccgttgcgcggtttattatcagtgaaggtaaagtaatccagataccagtccagtgtttcaatggttttttttaattctgccatctgctgtaatttgcgggatttttcctgaattaaatattcggttaatttatttttatcaccactttccataatggttttaatatcactcagattcatattcatcttctgaagatatttaattctgtcgatataatgaaattgttcaaatgtataataacggtatccgttttcattatccgtataaccgggtttgagaatggattttttatcataaaaacgcagtgtctgcgttgaaacgcctaatagtgcggcagtttccccgatagtaaaatatttcttcatgattgctgcctgtaaaataattacttttatttaaattatcagatttaaaattaacatactatttcccggggaaataattttgtgattatcttctcataacctgaattacggatttaaccttattccagctataaggtttagggtgtgcgcattgttatttattgttaaaaaagcaggataaaaaatgaaagaatgcacacagctattgtattcaggggaaatgaatttaccgggtcatattcatccggatgcgcccgctatttttccggccaccgcctatgccatgcaggatacacagcactattttgctgtcagcagcggcaatggcgagtatcagtataaccgtaccgcaaatcctaaccgggacagcttatctgccgcgatctcactgatggaagacggcgaagtctctgcagttatggcttccgggatggcagcaatctcagcgacattgcttagcctgctcagacagggtgaccatcttgtcgtgaatgaggctatttacggcgaaaccattgaactgattgatttaattctggttccgctgggggtaacagtaacctatgcggattttctgtcaccggagtcggtacaggccgccatccggccggaaacggtgatgctgtatactgaaattatcagtaacccgctgattaaagtggtcgatatcgatgccattgccggtatcagccgggcaaatggttgcctgctggtggtggataataccttttcaaccccgtttgtcatcaagcccttacagcacggcgcggatatcgtgatccacagcctgaccaaatttttcggcggccacagtgatttaactgccggttcggtgacctgctcacaggtactgatgcagaaaattgagctgaaagcccgtctgttgggaggatgcagtgatccttatacggcctggctatgtctgcgcagcatccggacaatggaaatgcggttatcgcgccagatggaaaatgcacagcatattgcagaagcactcagcggtgacccgcgtgtggctcaggtgaattatccgggcctggcgtcacatcctcagcatgatttagcgaaatccctgtttctgcagggctgcggcccgatgctcagtttccgtgtcgctgatgaccagacaaaagtcgatgcttttatccgccgtttaaatcttattacctatctgggcacgctgggcgggttccgcacctctctggcgcatccggcaaccgcattccgcactgaatttacaccgcagcaactgattgatttcggtatgcatgaggggcttatccgtatttctgccggatgcgaagctgccgaagatttaattgctgatattactcaggcacttgatgtgtttaattaaaccggatactcactatggacacgattcttaatattattaatcagttttcagattttatctggacttatccgatgccggttttattagtcagtcttggtatctggctgaccattaaattccggtttaaataccagctgaatttccgttttaatattaaaaatacctacggcgggttgtttaagaaaaaaaatgccggtgaacaaattcagggggcgggctcagtatccagttttgccgccgcctgtaccgcgctggcgaataccgtgggtatcggcagtatcggcggggtggcaaccgcgattacgatgggcgggccgggcgcgatattctggctttggttttctgcttttttcggaattgcgaccaaagcctgtgaaattattctcggccagcgttaccgcgtcaaatatgaaaaatcgatggatgagtatgtctgtgaccgctcatttgtgatggaacatgctctgggctggaaaaaaggtgcggttgcattgtcggtatgctgttttatgctcgggccgtggacttgtctggtacagagtgaatccgcgacgtcctctatcgaagaagcgtttaatgtcgacagttacctgacattgctggtgatggttatttttattgccagtgtcattatcggcggattaaaaggtatttcctccaaaatggaaagtgtggtgccgaaactggcgatcacctatctgaccgttgccgttattctgctggtgatgaattatgatcagatcctgcctgcatttgcgctgatttttaaatcggccttttcaccggctgccggtgtcggcggatttgccggagcaactgtgatggaagccatccgtttcgggatcgccagggggatttattccaatgacgccggaaccggctacggtattgtggcgcatgcggcagcaacaaccgatcacccgatccgccagtccagctggggtttcggcgaggttttcctgaccattattatctgtactgttaccgcgctggctattctgaccactaacgtgtgggtggattacgccggcattacctcatcacgcctgaccacgctggcatttaaagtgacatacggtgatgcgggcagctggtttatggcgatatttatcaccctgctggcctgtaccacgaccatcggtatgtattttacctgtgagaaagcggtgaactttttcttcggggataccagagccaataaaatcgcgaagaatttgtaccgggtttattacctggcgccgattgtgttattcactaaccttcaggccgatattttgtgggcgctgaccgatattctgagtgcggtctatgtgctgatcaccatgacattaatactgagccggcggaaagagattttccggttatttaatgatttctgggatcgctatattccggcgaaaaatgccggacaggatgtgccgccggtgacttactgtaagcggatagaataaaaaaatcaggccggtattcaccggcctttcttacattatcttcccagatatttatcccagtccttccagaccggctgaagaccggcggcgagcagggcatccgcgacctgctgcggcgagcggttgtcatgcgggctgaactgctccagttccggatcatcctcttcggcatagccgccgggctgagtgcgggaaccggcgctgacctggtttatcgccaccggcaccatatgatcacggaaatacggtgattcgcgggtggagagtgacagctcaatatccggtgcgaacaggcggaatgcacagataagctgcaccagctccgtttcattcatcagggattccggctcaataccgcctgcacacgggcgcaggcgcgggaaagagatggaataacgggttttccagtagcgctggcgcagatagtgcagatgttccgcgaccatgtagcagtctgtccgccactgaccggacaggccgatcagcgcgccgagcccgatcttgctgatcccggcctgaccaaggcgatccggggtttgcagccgccagtgaaaatcctgttttttccctttcagatggtgccgctgataggtgctctcatggtaggtttcctgatacaccatcacgccgtccagccccagcgtgcgcagttcggcgtattcctctgtcgccatcggctgcacttccatcatcatggtactgaaataatcacggatcagcgggaaggtttcgcggaagtagtccattcccactttgcgctgatgttcgccggtgaccagcagcaggctgtcaaagccgagggcttttattgccttacattcgctatggatttctgccggtgtcagggtcttgcgcttaatgtggttgctcatggagaagccacagtaagtacagtcgttggcacacaggttagagagatagagcgggacatacatcccgacgacatggccgaaacgctgccgggtcagagtctgtgctttctgcgccatcacttcgagatacggccgggcagccggggagatcagtgccataaaatccgtggtggtcagcgtgtctgcactcagcgcccgttcgacatcccgcgtggttttgctgttgagctgtaaggtgagatcatcccagtccagctgctgccagcggtcactgaaggttttttcactcatcacaatgctcccaggaatgaggtcagcgggctggatgccgatgcctgcaactgcttcggcgccagctctgcctcccgcgccagcagcccggcctcaatggccagacggaacgcttttgccatggtgaccggtgagcgggcaacggccatcgcggtattaaccagcacggcatctgcacccagttctatcgcctcgagggcgtggctgggtgcgccgatcccggcatcaatcactaccggaaccgttgcctgttcaataataatgcgcagcatatcgcgggtctgtaatccctgattggagccgataggtgcacccagcggcataacggcggcgcatccggcctcctgcaaccggcggcatagtaccgggtccgcactgcagtaaggcaggacaacaaacccctctttcaccagtatttctgccgcagccagggtttcaaccgggtccggcagcagataacgggcatcggggtggatctccagtttgatccagttggtgccgagcgcctcccgcgccagttgtgcggcaaacaccgcttcccgggcattgtttgcaccggaagtattcggcagcagtttaataccgagttcacggagcggggcaaggatatcatcgtgtccctgagaaaggtcgatacgcttcatcgccatggtgactaactggctgccggaggcggtaatcgcctcctgcatcacccggctgctggtgtatttcccggtgccggtaaataaatgggatgtaaatgtggtatctgcaatcgtcagcatcattaacctcctgcgatagcctgaaaaagtaaaatctgatcgccgtcgcggacaacgtgttctgaccagcagccacggacaacaatggtctgatttaccgcgacagcaatgcctgccaccgggcggccgagaaatgtcagtagttcactgacggtaatgggagaatcaatatccatcacctcgtcattcaccgttatgcgcatgcggctgcctcctgacacaccgggcagtctgctgcccgccggagctgtaatgtgctccagctttgctgtctgccgtcgaaaaggcgtaattttccgttcagcggggaagacaatcctgccagcaatttaatggcttccagcgcctggagcgtgccgatcaccccgacaaccgggccgagcacaccggcagttcggcagttgcgttccggaatgacatcatcgggatagaggcagcagtaacagccgtgctcaaacgggggctgcagtaccagaagttgtccgctgaaaccaaccgcgctgccgctgaccagggttttttgctgcgtcacgcaggcggcattgatagcatggcgggtggccatgttgtcggtacagtcgaggacaatatctgctgtttgtacaatacgttgcagcgtttcccgggtctgacgttcggtgatcacattgagtgtcagggccgggttcagtgcccgcagacgtactgccgcagtgcgggctttattgtccggcacatcggcttcggtatataaaatctggcgctggaggttggagagatgtacctcatcatcatcaatcagggtcagctcaccgacaccggcggcggccagatacagcgccgccggagaacccagcccgccgaggccggtgatcaccgcatgagactgtttgagtttcagctgaccttccgggccgatatcctccagcagcagctggcggctgtagcgcataaaatcatgatcattcagcatggtttacctcctgatattcagcggcttccccggtcagtgtcatcagttgccgggtggcggcctgccagtcagcggctttggtgatggcgctgaccaccgcaatactgccgacgccggtggcagcaacagcaggagcgcgttcaagggaaataccgccgatggcgaccagcgggaaatccggcgtggcggtaacctggcgggctaagttttctaaaccctgcggggaagagggcatgattttggtttgtgtcgggaaaatatgccccagcgcgatataggacggacgcagcgctttggcacgcagcaactcgttgtcatcgtgggtggaaattccgaggcgcagtccggcctgctgaatcgcccgcaagtcagcaatatccagatcttcctggccgagatgcacaccatacgcaccgtgctttatggcagaacgccagtagtcattgataaacagccgcgcctgatatttttcccccagcgcaacagcggtgcggatctgctcatccacctgtgcatcggttttgtctttgatgcgcagctgaatagtccgcacgccggatgccagcagccgctcaatccacaccagtgaatcgaccaccggatacagccctaatttatgttccgtccgggcaaacggcgcgtcaggcagattcatcgatacgctcctctgcactgtgatacagctcgctgcctttggcgcggaaggcgtcagacatctcttccatccccgcggcgtagtcgcggacttcctgtgagattttcattgagcagaatttcggcccgcacattgaacagaaatgtgcgactttgccggatgcctgcggcagggtttcatcgtggtaagtccgggcagtttccgggtccagcgccagattgaactgatcttcccagcggaattcaaaacgcgcttttgacatcgcgttatcgcggatttgtgctcccggatgccctttggcgagatcggcggcgtgcgcggcgattttataggtgataagcccttgtttaacatcttctttattcggtaatccgagatgttccttcggtgtcacataacagagcatggcacagccgaaccagccgatcagtgccgcaccgatgccggatgtgaaatggtcatagcccggtgcgatatcggtggtcagcggccccagggtgtagaacggcgcttcatggcagtgctccagttcttcggtcatgtttttgcggatcatctgcatcggcacatggcccgggccttcaatcatcacctgcacatcatattcccacgcgattttggtcagctcgccgagagtatgcagttcagcgaactgggcttcgtcgttggcatcctgaatagagcccggacgcagaccatcaccgagcgacagcgccacatcatacgccgcgcagatttcacagatgtcacggaagtgctgatagaggaagttttcctgatgatgggacagacaccatttcgccataatcgagccgccgcgtgacacaatgccggtcaggcgttttgccgtcatcggcacataacgcagcaggacaccggcgtgaatggtgaagtaatccaccccttgttccgcctgctccagcagggtatcgcggaacatctcccaggtcagatcctcggccacaccgttcactttctcgagtgcctgatacaccggcacagtaccgataggcaccgggctgttacgcaggatccactcgcgggtttcgtggatatagcggccggtggagagatccatcaccgtatccgcgccccagcgggtggaccagaccagtttctccacttcttcctcaatggaggaggtgacagaggagttgccgatattggcattcacttttaccaggaaattgcggccgataatcatcggctcggattccgggtggttgatattggacgggataatggcgcgtccggcagcgacttcatcgcggacaaactccggggtgatgttatccggcagattggcaccgaaatgctgtcccggatgctgttgcagcaggacttctccccggatacgttcacgtcccatattttcgcggatggcgataaactccatctccggggtgacaatccctttccgggcataatgcagttgtgtcacgcattttccggttttggctttcagcggtgccgggcggtttgggtagcgcagatggtcaaggccgttatcggccagccggtcacgggtaaaatcagaactcagttgtgtcaccgcctcggtatcatcccgctctgcaacccattgctcacgcagacgggcaagaccggcgcggacatccagtttcacctgcgggtcgccgtacggcccggcggtatcataaaccggtaccggctcattctcttcatactgcggattggctttatcaccgccgatcagagtcggggacagggcaatttcccgcatcggtacgcggatatccgggcgcgagccggtgagataaatacgggaggaattcgggaaattcacccctttcagggtgctgatatattcctctgccgcgtcgcgctgctcacggcgggtacgggctttggaaggagcggcggtttccgcacccggggagagatcagtggtatcaatacgttgttcacgggacatagcaaattccttacagtgaaaccggcaacgccggaagaaaaagtgagaaattgcttgtctggaggtgcgtcaggagtaatgcgtgataaccggctgtacccaaaaaccgcattgcggcggctgaaaacagcggttaaaaaaggaaagattactcttgttcccttcgcgggtactaacccgatcaggttccgcggatcccgaattaacggtctcagcccgatttatcacagagataaatactgggcactccgacaagaaagatttcagtataagaagctgcccggaaactacaacctttttataacatcatttatttacctgaagcattcccggtcatcctccctgatattcagcggttacgccgctgtggctaaagataaaaaaaattaaattaaaactgataatttccggtcagttgccgatgttttttgtcggcgtgccttattacggcatattaagaaaaaacaattggttatttattggccttattgattgctttctgcatcaggaaaaaagatgaatcttaaaaatacgacgattcgtgtcaggttatctgtcacatttggtgttctgatcgccattctggctttggtttccggaatggcggtgatgaacctgtataaagacaaagagatgttcacgaattacgttaacgggacatatgcacttcaggttcaggcgtatgaagtccgccatgcgacggaagagcgggctatcatgctgcgggatatgatcaatgcgactgataagaaagataaaacagaagaactgaaccgttttaaagaagaggacgggaaagtcagtaaaagaacgcagacactgctggatatggtcaatgagttcggcatggatccgcagggacgggcgttgcttgataagatgatagcggatgaaaaacactatgccgccgtgacccgtgaagtgcttgaactcgatcagcagggacgtcatgaggaggcgattgcgaaaatgatggatgccgaatatgcggcatcggatgcctatatcctgtcattccgtgccagccgcgatcatggcacggaaaccggtaatcagcttattcaggaatttaataccaattatgagcgccagagcaacattattctggtgttcgcgctgctggcgttaacgctggcgattgtctccggggtgatgattatccggaatctgacacgctctctgggcgccgaacccgcccaactgaaagaagtggctgaacgggtggcttccggtgatctatcgccgtccgatgaaattcatccggttccggacggtagtgtgctgagtaccctgaaagcgatgcagaggaatctggccagtatcgtcggtacggtgcgtaataacagtgacagtattgtgaccggcacaatgcagataaccagcggtaatgctgatctgagccagcgtactgaatcccaggccagcagtctgcagcagaccgcagcatcaatggaacagttgtctgctacagtgaaaagcagtgcggagattgcggcaaaagcgaacatgatggcagcggaagcgtccgaaaccgcccgtcacggtggtgagaaagtggatttggttattcatgccatgcaggatatctcaaactcttcccgcacaatcactgacattatcggtgtgattgattccatcgcattccagaccaatatccttgcactgaacgcggcggtggaagccgcccgcgccggtgaacacggacgcggttttgctgtggtatccggcgaagtccggacactggcgcagcggagtgcacaggctgccggtgaaataaaaaatctgattaataccagtgttgagcaggtggatgccggcagtaaactggtggcagaagccggtgagtcgatgcaggtgattgtcactcagacacagggtgtcagccagatgattgacgagctgacactggcggcaaatgagcagtctcagggcatttcgcaggtcgggattgctgtacagcagattgatgaagtcacacagcagaatgctgcgctggtggttgaaaatgcggcggctgcggaaagcctgcatcagcaggcggggcagctcatgcaggttatgacacagttcagactggggagcagcgccgcctgatccggctgatatccgctgccgtacctccggcagcgggtatcatatttatcagtgacgggcaggaggatcagctgtttactgggtttaatgaccacgtcagctgcatccacccctgcttttctgcttctgccttcaataccgggtcagcgttgaccgtcagcacatccgtggcgtagcggcacaggggtaaatcgttggcggaatcggtataaaaaatcgtacgttccggtaaaaactgacgaatatccagaaagttagccagtttttccactttcccttcccggaaggtggtgatcccctgcaatgcaccggtgtagtgatcatcccggacttccagttcgataccaaacgccagattcacacccagcatcttcgccaccggtttgacaataaaatcggcggtggcagaaatgatgatcaccggcacgccgtgttctttataaaacgcgagggttttgaccgcatccgggtagaccagcgggcgcactttgctttcggtaaaatcagctacccattcatcaatctgtgcaacggtggcattgcctaaggccttaaggctgaaggccatatacgcggccatatccagcttaccggcgctgtaatccgccatcatctgcttatctgcggcaagaaaggccggatcagtgataatgcctttttcccacaggtagtctgtccataacaggctgctgtctgcagcgattaaggtgtgatcgaggtcgaaaaccgctaatgttgacatgacgttcctttaattaactgacggggcaagggcgcggatttcatttttattgaacatcagctccagctgagtgccctgttcaaacagccgctctgaggagcggttcagcagatccacggtcagtgcgcccagcccggtatccacctgataacggataatattgcccagtaactgactgtcacggattgtacctgaaaccgggtgagaaatgtgttccccgtactgccttccggcctcgcgcacataaatggattccgggcggatcgccacaataccgctgagattcaggccgagcaggctgttggcgttgtgcgcgctgaccagattgtaatgccccataaaacgcgcgacaaactcattggcgggctgggtgtagatattttcggcggtatcgctctgcacgatttcacctttgttcatcaggaagatgcggtcagacatcagcatggcttcttcctggtcgtgggtgacaaaaatggtggtgagattcagctcgcgctggatctgacggatttgctggcgcagatgtttgcggatctgcgcatccagcgcggagagcggttcatccagcagcaggatgcgcggcttcatcaccagtgcccgtgccagtgccacccgctggcgctggccgccggaaagctgatgcggcagatgctgttcttttcctttcagacccaccagctcaatcacctctgcaacggatttgcgctgttcattttccgggactttctgcatcttcagaccgaaagcaatgttgcgttcagtggtcatattcggaaacagcgcatagctctgaaacaccatgccgatttcccgctgctgtggcggagatgaagtaatatactgtttattcacataaattctgccgtcattgaccggttccagcccggcgagacaacgcagcaaggtagatttaccgcagccgctcgggccgagcagagtaataaattcccctttgctgacagaaaaattcagaccggaaaagaccggagtggcagcaaaggattttgtcaggttttcagcaattacatagctcatcagtgattcctcagcggcttaagcgtgtcgcgatcagggtcaggatcagggtgaaaataaagtagctcgccaccagtgcggaggtgaagtgcccgctggtctggcgcatgttatagagatagatttgcagggtttcgtaacgggtgccgaccaggatattggcaaatacaaactcgccgaacaggaaggagaaggcgatcagcagcgacaccagcaaccctttgcggatatttggcaccaccaccagcagaaatgccttaaaagtgcctgcgccgagcagatgggcggcatccagcagatctttcagcggcacgccgttcaggctgttggccagcgcccggtacataaacggcagggtgatggtgaaataggtgccgatcaggatccacggcgtaccggcaatcggcagcggcccgtcagcaaacagctgtagtaatccgacggaggagaccaccggcggcacggcgaacggcagaataatcaggatctccatcagccctttcagccgcgggaagtaataaaacacggcaaacaccagcggcaggatcaccagggtgctgatggcaagggtgacaaaacagataaacagcgaacggccgaacgcggcaagaaaacgcggatcctgccacagtttcagataccactgtaatgtcaggccgtccggcagcaccgtggcaccccagcgggtggagaaggaatacagcagggtcgcgataatcggtaacagcagcaggatcacaatcaggctgagcatgattttgtgataacgcgccatggacggcggattgagtgtgagatcagcacttggcatggtaactccgtttcagcagccagtgatagacaacagtgatgaatccgaggataaccatcagcaggacagagagtgccgccgccatattcggctccaggaacaggtcgccggacaccaggctggcgatacggatggtcaccatattgtagttcccggtggtcagcgcataagtggaggcataagccccggcggcattggcgaacagaatgataaaggtgccgagcagcgccggcgaaagcaccggcagcgcgacatagcgccagtaggccgggcggccggcccccatggttttggcggcatcctcccactccggtttcagggcatcaaacgccggatagagcagcaggatccccagcgggatctgaaaatagagataaatcagcatcagcccggcagcgctgtagagattgaaatcctcaatcactccccaggctttcagttgcagggtgatggcgccgttgacgccgagaatgatgatgaaagcaaacgccagcggcacaccgctgaagttgccggtcatattggtaaaggcaatcagccagcggcgcggacgcggcgggacgtgctgtaaggaggcggcaaacagtgcggcgaggatcagcccgccgaccgccgataccccggaaatccacagagtgttttcaaaggactgaatataaaaagggctgctgaagatttcggtaaagttaccgaatgaccaggcatcttcatacacaaagctgttgataatcacccataacatcggcgcaagctggaaaagcgcgaacagcagagcagccgggagcagtaacagcatcggtttcagcggcagacggcgtgacagagggcgggtatgttgcttacttttcatcgcggtcagctccggcagaatatcagccatgttgcgtctcccgcagcaggcgcggtacagcggctttgttgtgtccgctcaggccgagcaaccggcagatggtgccgcacagctgtgtctgctgcaccggaagatcggcctcatgagagaaggcgtcaccggtaacaaacagcgggacagtgcgctcttcatccagaatcccgccgtgtgagcggtcattattcataccgtgatcactggtcaccagtacctgataacccgcttcaagccaggcaggcagatacgcggagagcaggccgtctgcacggcgggcgctgttgcggtattgctgtgaatccccgccggatttatgaccggcatcgtcaatattcatcgggtgaataagcaggaaatcggggtggtattgacggcgtaaatattccgcatcgaggaataaatgatcatctggatagtgatccgcctgataaaaacagccgtgttgtatcgcaagcgaatcatcgtgagtgaaacggtcacggacagcatcaaacggagcgcggttatacagctcactgacccagtgataagcggcggcagcggtggtttttccggctttttgtgcgagggagaaaatactgtcgttgtgtgacaggcgcaccacctgattgtgcaccacgccgctgtcaaccgggcgcacgccggtcagaatacattcataaagcgggcgggagagcgagggcagttcacagctcaggctgtacagtgtggcgttcccggattcggctaacccctgcataaagcccatgcagtcatgggctgtgcggtagtttaagccatccagaacaaccaggataactgggttattcattgtcattccgttaattcatgttgatgataacgttctgctgccacagtttcggcaactggcgggaggttttttcccagccgtcaaaatcggtaatcggtttggctttgctgtactgggattcaggcagcagtttggctttgatatcgtccggcagggtcaggtgtgctgcgcggatagggcgggcatatccttcggccaggttgagctgtcctttatcactgaagataaactcacgggccagtttggcggcgttcgggttcttcgcgtatttgttgatgatggtggtgtaaccggaggtgacagagccgtcagacgggatcaccacggtaaagcgtttggcatcaatctggtcgcggtagttaagggcgttgaaatcccacattaccgccacttccacttcccctttttccaggttggccacgctcgggtcattcagggataaacgtttctgtttggcgagatcggcaaacaactcaatcgccggctgaatattggtttcattaccgccgagggcaaaggccgcagacagcacgccgctgttagcctgtgccgcgataccgacatcaccgattgtcacgcggtagttaccgctgcgcagatcagcccagcttttcggctgttctttgacaaggtcattattgatgatgaatgcaatggtgccggtataggccagcgcccagttaccgtctttatcttttgcccagtccgggatctgatcccaggtggtgggtttataaggctgcaccacatctttctgaacggcgacagggccgaaggcggcaccgacatccccgatatctgcggtggcattacttttttcagccgcaaacttggcaatttcctgagcagagctcatgtcggtatcctgatggcggatactgtagagtttttcaagatcagaccaggtgcctttccagttggcccaggtatccggcatcccgacactgtaaaccacgccctcttttttggcggcggcaatcagttcttcaggaatggtgttttgtccggcagagaacgcagaaaaagaggcggaaacagcaacggcggtcagcaatattttggcagcaggaaaacgtgtcataaaaccctcgtcagttaactgattcagtatcagtggtgaggctagggtatgacgcgtttgtgacaggcaactgacacccgtgtgacacttttctgacagccgggtgacagggaaatgcatgccccgttatgccgagtattctccccgcaaacggagtatgatttaatccattattatttcattaacatgatgtctctattatgcagcagattttaacgggcaatgaaaccggctactgggttatcagcgcggataaccgcgtctggctgccggaaggacaactgccggagggcagtgcggcacaatggatgctgaccgggaaaccggcggtgcgtatcggggagtggcaggggctgccggtctggctgatccgcgaaaaaatgcgttccgatatgtgttcgccgcgcattattgccgcagagaatgatgacctcttcaaaatggccggacgcggcgtgcaactggcggaattctaccgctcgcaccgttattgcggctactgcggtgcggcgatgaaatacagtgaaagtgagtgggcgtgtctgtgtgacagctgccgcgaacgttactatccgcagatagcgccgtgtattattgtcggcatccgccgtcatgactctattctgctggcacagcaccgccgccacaaaagcgcgccgttgtttaccgtactcgccgggtttgtcgaagtcggcgaaaccctggaagaagctgtcgcccgtgaggtgatggaagagagccggattgagattcagaatatccgttatgtctcctcgcagccgtggccgttcccgcactcgctgatgatgggattcctggcggattatgcggatggtgaaattcatcacgatccgtcagagctgctcagtgcagactggtaccgctatgataatctgccggttattccgccgccggataccattgcccgccgtctgattgaagatacagtcgtactgtgccgtcaggatgacgaagacgcgtaacaccgccctgaccccgggcggcaggcgtgctacaatgggttttattcaggacgtcaatacgttacgcggccaacaactttttggagtctgtcatgagtgaactgaaaaacgaccgctatctgcgggcattactgcgtcagccggtggatgtcacccccgtgtggatgatgcgccaggccgggcgttatctgcctgaatataaagccacccgcgaacaggcgggggattttatggcgctgtgcaaaaacaccgaactggcctgtgaagtaactctgcagccgctgcgtcgttttccgctggatgcggcaattctcttttccgatattctcaccattcctgatgcgatgggtctcgggctctattttgaaaccggtgaagggccgcgctttgtgcatccgatccagaatgcccgtgatgttgaaaaactgccggtgccggatccggaacaggaactcggttatgtcatgaatgccgtgcgcgccatccgcaaagccctgaacggcgatgtgccgctgattggtttctccggcagcccgtggacactggcaacctatatggtggaaggcggcagcagcaaagcctttaccaaaatcaaaaagatgatgtatgccgaaccgcagaccctgcacctgctgctggataaactggcggacagcgtgatcctctatctcaacgcgcagattaaagccggtgcacaatccgtgatgattttcgacacctggggcggcgtgctgaccgggcgtgattaccgtgagttttcactcaattacatgcacaagattgtcgatggtctgatccgcgaaaatgacggtcgccgtgtaccggtcactctgttcaccaaaggcggcggacagtggctggaagcgatggcagaaaccggctgtgatgcgttggggctggactggaccacagatatcgcggatgcccgccgccgggtcggtagtaaagtggcgttacagggcaatatggatccgtccatgctctatgcatcacctgcccgcattgaagcggaagtggcatctatcctcgccggttttggtcagggcgaagggcatgtgttcaacctcggacacggcatccaccaggatgttccgcctgagcatgccggtgcattcgttgaatctgttcaccgcctgtcagccaaatatcatcagggctgatcactgacagaccacggaggtcaccatgacagccatcgacacccgcgccctgaaagcacggcagacagaactggcacaacgggtcagtctgcaggatgtgccgcttaatccccgctatatcgcgggggtggatatcggctttgaggacgggggaaacgtcacccgggctgctgtggtgatcctcacctggcctgaactggaagtggcggagtatcagaccgcccgcattcccacacaactgccctatattccggggctgctctccttccgtgaaatccccgccgcacttgccgcgtgggagaaactgaccttaaaaccggatctggtgctggtggacggccaggggcgcgctcatccgcgccgtctcggcgttgccgggcatctcggggtgctgctggatttacctgccatcggtgtggccaaaagccggttgtgcggcacgtttgaaccgctgacggaagaggccggtgcacaatcgctgctgacagacaaaggtgagccgctcggctgggtctggcgcagcaaaaaccgctgcaatccgctgttcatttcacccggtcatcatatgagtattgacaccgcactgacctgggtaaaagccctgacgcgcggctatcgcctgcctgaaccgacccgctgggctgatggcattgcctcaaatcgaacattttttgtccggttgaaacagaaatttcccgattttccacgtaaagatgtggatatcacggattttcaggtaaactgcggctcacatcagagtaacgagtaaagcggaatgttaaagaacccgatccacttacggctggaaaaactggaaagctggcagcatctcaccttcacggcttgtctgtgcgagagaatgtacccgaattatgccgttttttgtcagcagaccgggtttaccgatccgtcgctttaccggcgtattctggatctcatctgggaagtcctgactgtcaaagacgcaaaagtgaactttgataaccagctggaaaagctggaagacattatccctgatggagacgactatgatatctacggtgtgtatccggcgattgatgcctgcgcggcactcagtgagcttatccatacccgcctgagcggggaaacactggagcacgctattgcggtcagtgagatttcagtcggcactgtcgcggcactggaaatgacacaagccggacgcgaaatgtccgacgacgaattaaatgaattgcccgctgttgaagaagagtgggacattcagtgggaaatttaccgcttattggccgcctgcgaagagcgcgatattgagttgataaaaggcttgaaatccgatctccgggatgcggggatcagcaatattggcgttagtttaggcgattaaatcaaaaaacgtgatttaagcctataaatgccggtgttaaaggcttcacaattgccccgtctctggtctacagtggggggcgaaaagaagtggctatcggggcgcgtgtatcagggctgtcaaaaggcacatccgacgcactcgatgctttgcaaacgataaacacactgtaaggatattttatgaataagactcaattgattgatgctatcgcagaaaaagcagagctgtctaaagcacaagctaaagcagcgctggaatcaactctggcggccatcactgactctctgaaagaaggcgatgctgtacaattagttggcttcggtacttttaaagttaaccatcgtgcagagcgtactggccgtaacccgcagaccggtaaagaaatcaaaattgcagcagcaaacgtgcctgctttcactgccggtaaagcactgaaagattcagtaaaataattgcgttgcaaaaacagattgatagagggggatttcgtccccttttgttgatcagacaggggctacttgcactgggctttggctcattgctcagcgcctgctctgttcagcctgaccttcctcccttcagcgcgtccggttatatcgcggacgacggtgctgtcagaatgtggcgtctcaacgctgacaaccaaccccgtgtcctgatgagtgttttcagtccctaccgcagcggacaacagaccgtcgtcaccgtttatgaataccgcagaggccagctctggcagatccgtgcagaatatctgggcgataacggtttttctgaacagatacggctggatcacgagggcaataccatctttatgcagcgtgataaagacgggcataaatccccgctgaccgcagacgaaatcacccggatgacctttgtggcggacagacagctgacacttaacagcgcactggtgatcggtgatatccggctgaaacaggggcagtggcgtgacagctatgtcacggattgtcagggtaataaatcctacattgaatttgatgcggaaacagaacagttcctggcgaagcgtcagcgcagcagcgcatcacctatctacattgcatggctggattcaccggaaggacgggaaattctgctggcggcaaatgataacttctgtaaatgggaacctacggaagattcactgtaaatctcccgcagggtattaacgtggtttacttattcagacgggcaatagcacggtagccgatatcactgcggcaaaatgcatcatcccagtgaatatgtttcagtgcggcataagcctgtttctgcgcctgagcaatatcctcacccagtgccgtcacacacaacacccggccgccgtcagtcacaaccgcaccttctttcagtgctgttccggcctggaaaactttgcagtctgcttcctgaatatccagtccgctgatcacatcacctttacggtaatcacccggataaccaccggctgccatcaccacaccaagcgccggacgcggatcccacagcgaggtttttcccgccagttttccctgtgcaccggcaaggcagagttcaaccaggtctgactgtaaccgcatcataatcggctgggtttccggatcaccaaagcgacagttaaattcaatcactttcggctcgccgtgttcatcaatcatcagcccggcgtataaaaagccctgataggtgtgaccttccgccgccataccttcaacggtcggataaatcactttttccatcacccgctgatgaacggcatcggtcaccaccggtgccggggagtatgcacccataccgccggtgttcggcccggtgtcattgtcaccgacccgtttgtgatcctggctggtcgccatcggcaccacatttttaccgtccaccatgacaataaaactggcttcctcgccggtcaggaactcttcaatcacaatgcggtgcccggcatcgccgaaagcattaccggccagcatgtcatgtaccgcgtcctgtgcttctttcagggtcatggcgacgatcacgcctttaccggccgccaggccatcagctttgatcaccaccggtgcaccggttttgtccagataagccagtgccggttcaacctcagtaaagttctgatagtccgccgtcgggatatggtgacgcgccagaaaatctttggtgaatgctttggagccttccagctgcgcggcacctttggccgggccgaagatagtcagaccggctgcattgaatgcatcaaccacgcccatcaccagtggtgcttccgggccgacaatggtcaggccgatattattggcgcgggcaaaggccaccaggccgtcaatatctgtcgcactgatatccacattggtcaggtttggttcctgtgcggtaccggcgttaccgggcgcgacataaacattggctgccagcggggattgtgcagctttccaggccagcgcgtgttcgcgtccgccattaccgataatcaggatattcataagtcagctccgggtattaatgacggaaatggcgcatgccggtgaaaatcatcgcgatattgtgttcatctgctgctgcaatgacttcgtcatcacggatagagccacccggctggatcacgcaggtaataccaacggcagctgccgcatcaataccatcacggaacgggaagaacgcatcggatgccatggcgcatcccgccacttccagcccttcatcaccggctttgatgccggcaattttcgcggagtaaacacggctcatctgaccggcacccacaccgatggtcatattattctttgcataaacaatggcattggacttaacaaacttcgccactttccagcagaacagggcatctttcagttcctgctctgtcggctggcgtttgctgaccactttcaggtcagtatcaccgaccatcccgagatcgcgatcctgcaccagcagaccgccgttcacccgtttgaaatcaagggcggcagccggatgctgccactgaccgcaggtcagcacgcggacattctgttttgccgcgagaaccggcagcgcatcttccgcgacggacggggcaataatcacttccacaaactggcgttcaataatttctgccgccgttttggcatccagttcgcggttaaaggcgataataccgccgaatgcggaggtcgggtcagttttgaaggcattgtcataggcggtaagtaagctatcggcaacggccacgccacacgggttggcgtgcttgacgatcacacaggctggtttatcaaactgcttcacacattcaagggctgcatcagtatcagcaatattattataagagagggctttgccctgtaactgcacagcagtactgatggaggcttcctgaatattctcttctatatagaaggcggcattctgatggctgttttcgccgtagcgcatatcctgctttttaatgaagttgagattcagggtacgcgggaactgaccggaaggctgagtggtatcgccgaagtacggttttactttctgaccgaagtagttagcgatcatgctgtcataagccgctgtatgctcaaaggctttgatggcgagatcaaaacgggtatcgaaactcaggctgttttgtccggcatccatctcggcaatgatattgctgtagtcactgctttttaccacaatcgccacatctttatggttcttcgcggcggagcgcaccatggtcggcccgccgatatcgatattttcaaccgcgtcttccaatgtgcagccgggttttgccacggtctccgcaaacggataaagattcacaaccaccatatcaatagcggaaatctgatgcttcgccataatctcatcatcggtgccgcggcggccgaggatcccgccgtgtactttcggatgcagggttttgacacgtccgtccatcatttccggaaaaccggtgtaatcggagacttcagtcaccggcagaccggcgtcagccagcaggcgggcagtaccgccggttgataacaattcaacaccacgggcggaaagagcctgagcaaattcagtgatgccggttttgtcagagacactgagcagggcgcgacggatagggcgaggctgttgcatgagtttggatcccttgaattcaacgaataaatgacaataggttgcaggtgaaatcggtgtatctcataagatttcaaaacccggagtaaaaagcaacggtacacgaatgcagcagattgtaacgcaaacgtttgcgtgttgcttgtgaattttgtgattttttaccatctgtggataactttgtgtgtaacccggtataaacaggggttttgctggggaatgcagcaaacagtcagaaaatcgaaaattaacacttgtcttctgaaatcgactccctataatgcacctccactgacacggaacaacgcgctaacacgcggtccggcaggaaaaaagagaacggcgtataagaaattattgcttgactcgaaggggctggaaacgtaatatacgcagcctcgcaacaacgcagaagacggcaacggcagcgaatgttgcaactgctctttaacaatttatcagacaatctgtgtgggcactcgcaggacatatcacaaaaaatattatttttgagaagtcttgaagagtgaccaatacagcagcttagtaataagcagcagtaaacagtttaattctttgagcatcagacacttttaattgaagagtttgatcatggctcagattgaacgctggcggcaggcctaacacatgcaagtcgggcggtaacagggggaagcttgcttctctgctgacgagcggcggacgggtgagtaatgtatggggatctgcctgatggcgggggataactactggaaacggtagctaataccgcataatgtcttcggaccaaagcgggggacctccgggcctcgcgccatcagatgaacccatatgggattagctagtaggtgaggtaacggcttacctaggcgacgatccctagctggtctgagaggatgatcagccacactgggactgagacacggcccagactcctacgggaggcagcagtggggaatattgcacaatgggcgcaagcctgatgcagccatgccgcgtgtatgaagaaggccttcgggttgtaaagtactttcagtcgggaggaaggtggtaaggttaataaccttatcaattgacgttaccgacagaagaagcaccggctaactccgtgccagcagccgcggtaatacggagggtgcaagcgttaatcggaattactgggcgtaaagcgcacgcaggcggttgattgagtcagatgtgaaatccccgggcttaacccgggaattgcatctgatactggtcagctagagtcttgtagaggggggtagaattccatgtgtagcggtgaaatgcgtagagatgtggaggaataccggtggcgaaggcggccccctggacaaagactgacgctcaggtgcgaaagcgtggggagcaaacaggattagataccctggtagtccacgctgtaaacgatgtcgacttggaggttgtgcccttgaggcgtggcttccggagctaacgcgttaagtcgaccgcctggggagtacggccgcaaggttaaaactcaaatgaattgacgggggcccgcacaagcggtggagcatgtggtttaattcgatgcaacgcgaagaaccttacctactcttgacatccagagaacttagcagagatgctttggtgccttcgggaactctgagacaggtgctgcatggctgtcgtcagctcgtgttgtgaaatgttgggttaagtcccgcaacgagcgcaacccttatcctttgttgccagcgcgtgatggcgggaactcaaaggagactgccggtgataaaccggaggaaggtggggatgacgtcaagtcatcatggcccttacgagtagggctacacacgtgctacaatggcgtatacaaagggaagcgaccccgcgagggcaagcggaactcataaagtacgtcgtagtccggattggagtctgcaactcgactccatgaagtcggaatcgctagtaatcgtagatcagaatgctacggtgaatacgttcccgggccttgtacacaccgcccgtcacaccatgggagtgggttgcaaaagaagtaggtagcttaacctccgggagggcgcttaccactttgtgattcatgactggggtgaagtcgtaacaaggtaaccgtaggggaacctgcggttggatcacctccttacctagttggtattgaatgtgagtgttcacacagattgtctgatagaaagaagcagataccgggaataggcttgtagctcaggtggttagagcgcacccctgataagggtgaggtcggtggttcaagtccactcaggcctaccaaaaccgaattgatactgcgttatgaaaagactcgtttaccttagtaaacttcgcctttccatgccttgtctcaatgcggtttcctcttttcatgatgaaaagacacgcccgggaaaaccaaataatggggctatagctcagctgggagagcgcctgccttgcacgcaggaggtcagcggttcgatcccgcttagctccaccattatctaatattgtttgggtaggggagcgttctgtaagcctgtgaaggtgtgctgtgaggcatgctggaggtatcagaagtgcgaatgctgacataagtaacgataatgcgggtgaaaaacccgcacgccggaagaccaagggttcctgtccaacgttaatcggggcagggtgagtcgacccctaaggcgaggctgaaaagcgtagtcgatgggcaacgggttaatattcccgtactggtggtaactgcgaaggggggacggagaaagctaaatcatccgggcgacggttgtcccggtttaagcgtgcaggtggactgaccaggcaaatccggtcggttgttaacactgaggcgtgacgacgagccactacggtggtgaagtgattgatgctctgcttccgggaaaagcctctaagctccaggttaccattaatcgtaccccaaaccgacacaggtggtcaggtagagaatactcaggcgcttgagagaactcgggtgaaggaactaggcaaaatggtgccgtaacttcgggagaaggcacgctggcattaggtgaagtggtttacccacggagctgaagccagccgcagataccagctggctgcaactgtttattaaaaacacagcactgtgcaaacacgaaagtggacgtatacggtgtgacgcctgcccggtgccggaaggttaattgatgaggtcagccgcaaggcgaagcttctgatcgaagccccggtaaacggcggccgtaactataacggtcctaaggtagcgaaattccttgtcgggtaagttccgacctgcacgaatggcgtaatgatggccaggctgtctccacccgagactcagtgaaattgaactcgctgtgaagatgcagtgtacccgcggcaagacggaaagaccccgtgaacctttactatagcttgacactgaacattgagccttgatgtgtaggataggtgggaggcaacgaagtgtggacgccagtctgcacggagccatccttgaaataccaccctttaacgtttgatgttctaacccgggtccataatctggatcggggaccgtgtctggtgggtagtttgactggggcggtctcctcccaaagagtaacggaggagcacgaaggttggctaagcatggtcggacatcatgcggttagtgcaaaggcataagccagcttgactgcgagagtgacggctcgagcaggtacgaaagtaggtcttagtgatccggtggttctgaatggaagggccatcgctcaacggataaaaggtactccggggataacaggctgataccgcccaagagttcatatcgacggcggtgtttggcacctcgatgtcggctcatcacatcctggggctgaagtaggtcccaagggtatggctgttcgccatttaaagtggtacgcgagctgggtttagaacgtcgtgagacagttcggtccctatctgccgtgggcgctggaagattgagaggggttgctcctagtacgagaggaccggagtgaacgcaccactggtgtacgggttgtgatgccaattgcattgcccggtagctaagtgcggaagagataaccgctgaaagcatctaagcgggaaacttgcctcgagatgagtcttccctgaccctttaagggtcctgaaggaacgtttgagactaagacgttgataggctgggtgtgtaagcgcagcgatgcgttgagctgaccagtactaatgaaccgggaggcttaacctgacaacaccgaaggtgttttgagttgagagacgaaagaatttttcagcatagtgacagagcataaagccggtcactatgaaaagcttgttttggattgaaatgaatttgcctggcggccgtagcgcggtggtcccacctgaccccatgccgaactcagaagtgaaacgccgtagcgccgatggtagtgtggggtctccccatgtgagagtagggaaccgccaggttattattaagtgagggtgcagaactgcatcagtcacacagagatacgcggagcggtagttcagttggttagaatacctgcctgtcacgcagggggtcgcgggttcgagtcccgtccgttccgccaacaaacattaaccccgataggaaactatcggggttttgttttttgtatgaaataaattcaccttgctgttttttcctcgacagaacctctctttttcgttagttttggatgtccggatgtctaaaataacaaggagagcccgccgctatgccaatccgtatccctgatgaacttcctgctgtcactgatctgcgtgatgaaaatatctttgtgatgacatcatcacgggcacaatttcaggatatacggccactgaaagtgctgtttttaaatctgatgcctaagaagattgaaacagaactgcaatttctgcgtctgctctccaacacaccgcttcaggttgatattcaactgctgcgtatcagtcaccatgaatcaaagaacacacccaaggcgcatctggatgccttttattgtgactttgatgatataaaagaacagaattttgatggtctggtgatcaccggtgcaccactcggtctggttgaatttcaggatgtggattactggccggaactggatgagattatccgctggtcacagacacatgttacatcaacactttttgtctgctgggcggtacaggcggggctgaacacgctttacaatatcccgaaacaaacgctgccggaaaaaatctccggggtgtatacccacactacacttatgccgcatgcgctgctgaccagggggtttgacgggcagttttctgcgcctcactcccgctatgcggcatttcctgaagcgatgatccgtgaaaacaccgatcttgatatcctggccgcttctgaagaagccggagcctatctgtttgccagtaaagacaagcgtcaggtctatgtgaccggccatgcggaatatgacgcggatacattggcgggagaatatcagcgtgactcggatgcggggctggatcctgctatcccggtgaactattttccggataacgacccgtcgaaaacaccggtatccagctggcgcggacatggtcatctgctttatgctaactggctgaattattgtgtttatcagataacaccgtatgacctgagtgtgatgaatccgacggcggactgataaaaaaagccaccgcgaacggtggcaaaaggcagacttaattcacgatgtcttatgcagcggcaccggccacagcttgcgccgccagtgcagtaatacgatcatagtctccgccacagagtgcatcttccggcaccagccatgagccgccgacacaggccacactgctgagcgcgagataatcccggtagttattcagggagatcccgccggtcgggcagaaacggatatccgggaaagggccggagatagctttcagcgctttcactccaccgtttgcttctgccgggaagaatttaaaatttttcagtccgtaagctataccagccatcagctcggaaacggtggcgatccccgggatcagcggaatggagccctgatcggctgcctgtaacagagattctgtcagaccggggctgatagcaaactgtgcaccggcgtcagtgacggctttcagttgctccggattaatcacggtacccgcaccgacaatcgcttccggcacttcttccgcaatggcgcggatagcttcaattgcacactctgtacgcagtgtgacttccagaacgcggatcccgcctgcgaccagtgcacgggccagcggtactgcctgatgcagctcacggataacaatgacaggcacaaccggtcctgcatttaaaacggattgcgcacttaacatctgatcattcatcgtcattctcacttttataaaaacggatacagcaggcgccttcttccgcacctgagagttgcgtgcgtaatgcactgaataattcacggcctgagccgtcccgctctgcgctgaggtcaggaatgacactttcacgttctgccagaacagcctcatcaacaagcagcatcagctcgccggtctgcccgttcacccggatcatatcgccgtcgcggactttggtcagcagcccgccggtatacgcttccggggtaacgtgaatagcggaaggcactttgccggatgcaccggacaaacggccgtcggtgaccagggccacccggtagcctttatccatcagcacgcccagcggcggcatcagtttgtgcagttccggcatcccgttggcctgcggcccctggaaacgcactaccacaacacaatctttgttcagttttccggcctcaaacgcgggcacaatatcatgctggctgttaaacacgatggccggggcttcaataatctggttatcggcaggaacagctgaggttttcatcaccgcacgtccgagatttccagtcagtactttggtgccgccgtgagacgaaaacggtgtatttccggatgcaatcacactgtcatcaagcgagctgagcgcgccttcccgccatttcaattcaccgttatccagccacggctcctgtgtataacgggataagccgaaaccggcgacagtatgaacatcttcatgcagcagccccaggctgagcagctcacggataatcagctgtaacccgcctgcggcatggaactggttgatatctgctgggccattcgggtagatccggctgagcagcgggataatgtccgacagctcagaaaaatcatcccagttgatgatgatcccggctgcagcggccattgcgataaggtgcatggtcagattggtggaaccccctgttgccagcaaaccgactatgccgttaacgatgactttttcatctaccagttgcccgaccggcagataattgccgctgttttcagtaaagcggacaacctggcgggcagcggcatccgtcagtacggtacgcagcggggtatcaggatgaacaaaggacgcgcccggcagatgcagccccatgatttccatcaccatctgattggaattggcggtgccgtaaaaggtacaggttccggctgaatgataagaggccgcttctgcatccagcagtgcccggcgatcaacttttccttcagcaaataactgacggacatgtactttttctttattcggcagaccgctggtcataggacccgccggaataaatacggacggcagatgcccgaaagagagtgccgccatcatcatccccgggacgattttatcgcagatcccgaggtaaagtgcgccgtcaaacatattgtgggaaagcccgacagcggcagacatggcaatcacatcacggctcagcagggacagctccataccatcctgcccctgggtcacgccgtcacacatggcgggaaccccgccggcaacctggccgatggcacccacgctgtgcagtgcagctttaatttgtgccggataaaattcatacggcttatgtgccgacaacatgtcattgtaagcagtgatgattgcaatatcattatgcgccatattgcgtaactgttgtttctcatcaggctggcaggcggcaaagccatgcgccaggttaccgcaggcaagctgggcacgatgaacggttttactgcgtgcggcgctgattttttccagataccgggcacgggatacacgggaacgcgccgtaatacgggcggtaatttctgaaagtcgcggatgaaccggcgggtacgcagaatgtgtcatagtcatggctccgtgctgattatctgcctgctgcagtatcattaattcgtttgttaccggtaacattggcatagatcagcaacggattgcaacttttatgagcaattctctttcctgaatatgatccacctcaaatttagctgaaacgagaaagctttcggcgcggatcgaataaccagaaaaagagggttgagtacctttgcggatcacagcaacatgaaaaacgctcaggttgcacgttaatgcactcagggaaagttgtggtagtatagacgttcagacggctatttaaacgggcattgcagagcggagtcagataaatggataataaaatcagtgtattaaaaaaagcgcttaatcaacggatcctgattcttgatggtgcgatgggaacgatgatccagcgctatgcactgaacgaaaaggaataccgcggtgagcgtttcgctgactggccggtggatctgaaaggaaataacgatctgttatccattacgcagccggatattatccgcgagatccatcacgcctatctgggagccggcgcggatattattgaaaccaacagttttaactccacggttatttccatggcggattatcagatggagtccctgtctgatgaaatcaatgaagccgccgcgaaactggcgcgggaatgtgccgatgaatggacgcgcaaaacgccggagaaaccccgctatgtggccgggattctgggtccgaccaaccggacggcatcaatctctcccgatgtgaatgatccggcttaccgcaatgtatcctatgatgcgctggttgaggcttaccgcagctctgtgcgggcactggtccgcggcggggctgatatcattatgatcgaaacaatcttcgataccctgaatgccaaggcggcgatttacgctgttgaaaccgagtttgaggcgctggggattaaattgccggtgatgctttccggtacgatcactgatgcctccggccggacactgaccggtcagacaactgaagccttttataactccatgagacacatccgcccgatctctttcgggctgaactgtgcgctggggcctgctgaactgcgccagtatgtggcggagctgtcccgtatcgcggattgttatgtcagtactcacccgaatgccggtctgccgaatgcgttcggcggttatgacctggatgccgccaatatggcgggctatatcagtgagtgggcacagtccggtttgctgaatattgtcggtggctgctgcggcaccacgcctgaccatatccgtgcaatcgcgcaggcggtagcggatattccgccgcgtgttattcctgatcgccctgtggcctgccgtctggcggggctggagccgctgaccatcgatgagaattccctgttcgtcaacgtgggggagagaaccaatatcaccggctccgcacggtttaagcggctgattaaagaaggtaattaccaggaagcattggatattgcccgtaaccaggtggagaacggcgcacagattattgatatcaacatggatgagggcatgctggattcacaggcggccatggtgcgtttcctgaatatgatttccggtgagccggatattgcccgcgtaccgattatgatcgactcctcaaaatgggaggtgatcgaggccgggctgaaatgtatccagggtaaaggcattgtgaactcgatttccctgaaagagggagaggcagcctttatcgatcatgccaaaaaagtgctgcgttacggcgctgccgtgattgtgatggcctttgatgaaaccggccaggcggatacccggcagcgcaagacagaaatttgtcagcgggcttaccgcattctgactgagcaggtgggattcccgccggaagatattatttttgacccgaatatttttgcggtggcaaccggtattcctgagcataacaattatgccgttgattttattgaagcctgtaaggatatcaaagcgacactgccccatgcactgatctccggcggggtctccaacgtctctttctcgttccgcggaaatgatccggtacgggaagcgattcacgccgttttcctctattacgctatccgtaacggcatggatatggggattgtgaatgccgggcaactggccatttatgatgatttaccggctgcactgcgtgatgcggtggaagatgtgatcctgaaccgccgcgaggatgccactgaccggctgctggcgctggcagaagaatatcgcggcagcaaaggggaaaatgatcagccgcagctcgcggaatggcgcgggtgggatgtggaaaagcgtctggaatatgcactggtgaaagggatcacggaatttattgttgaggataccgaagccgcccgtctgcgggctgacagcccgattgaagtgatcgaaggcccgctgatgaacggcatgaatgtggtcggtgatctgttcagtgagggaaaaatgtttctgccgcaggtggtgaaatccgcgcgggtgatgaaacaggcggtggcgtatctggaaccttatattcaggcagcgaaaaccagcggctccagtgccgggaaagtcctgctggcgacagtcaaaggcgatgtgcatgatatcggcaagaatatcgtcggcgtggtattgcagtgtaataactatgaaattatcgatctcggggtgatggtgccctgtgaaacaattctccgcacggctattgaggaaaaagtcgatattatcgggctgtccgggcttatcacgccgtcactggatgaaatggtacatgtagccaaagagatggagcgtcagggattttccctgccgctgctgatcggcggtgccaccacatccaaagctcatacggcggtgaaaattgaaccgaattacagcggcccggtaacctatgtacagaatgcctcacggacggtcggggtcgtggcggcgttattgtcagataaacaacgggatgagtttgttgcccgcacccgtaaagaatatgaggttgtccgcgaccagtatgcccgccgtcagccgcgctcagcaccggtgacactcgcacaggcgcgggcaaatgcgtttgcggcggactgggataattatacgccgccgcgcccggcatttaccggcgtgaaaaccgtcactgcaccgatttcggtactgcgccgttatattgactggacacctttctttatgacctggtcactggccggaaaatacccgcgtattctggaagatgatgtcgttggtgaagaagcccgccgcctgtttaaagaggcaaacgcgatgctggatgagctggacagaaccggcgcactgacaccgcgtggcgtggcggggattttcccggctaaccggatcggcgatgatattgcggtttaccgtgacgaatcccgcgaagaggtgctgttatacagttgtcatctgcgccagcagacacagaagaaagatgatttcccgaatgcctgcctggcggattttgtcgcaccaccgggaattccggattatctcggagcctttgctgtcaccggcgggctggaggaggatacactggcagctcagtttgatgcggcacacgatgattacaataaaatcatggtgaaagccctcgctgaccggctggcggaagggtttgcggagtatctgcatgagcaggtgcgtaaaactatctggggctacagtccggatgaaaacctggataatgactcgctgatccgcgaaaactaccaggggatccgccccgcacccggctacccggcctgtccggaacatacggagaaaagcaaaatctgggaactgctggatgttgaaagacataccggcatgcggctgacggaatcttatgctatgtggccgggggcatcggtatccggctggtatttcagtcatccgcagagccgctattttgcggtggctcagatccagagagatcagattgaggattatgccgcccgcaaaggtatgccggtgaaagagcttgagcgctggctggccccgaacctggggtatgatccggaagactgagtattatcgcatgtcagtctcctgtcccggtttgcgttaaccaccgggtactgttctgcgtatagtgaattccgctgtatcactgtacgccattatcagaacagaaggagaaccgtatgaattcagtatttatcattgctgacggccgggccggggaggtgatatgacactccccgttttcaggccgttaattatatctgccacttttgtattatgcagcgcattcgccggtaactgccgggcggagactgatctgccatgcactatgaccctgcaacacagagccatcatgctggatggcgcgacgtgcatcagcaaaaagcggttaccgggctgccctgtgctatgccagccgtcagaggtgcaggaaaaaaacgttcaggttacctgttttcgtcccggagagcctttaccttttgacagaactgcagatgtcactgtcccggtggtctgtgaaatcatactccctgtggatatttcaccggacaccacaccataatctgaaataaaacaggataaccggccgggatcctttcaatcgttttctcaattatcacgcaatgtgacagcctgctcttgtcattgtttttttcatccccatttatagataagtaattttcccgtactatggctgacaacagccgtgaccgggcatatcagattcagccataaaagggagtgatgagacaatgtaccgtttctatattcaggatgctttacctgccgggtgcctgcccgcgtattcgctgccgaaagcagatcagcctcattattatgaattggatgagagtatcctcaacgctgcactgaatatcatgcagatcacggatatcctggataccgatgatgtgctggatgatgactgttttaaccgaatctggctgaaaagcgagctgacacccgcccgggcgtcagaggtctatcacttcttatatcagcagcaactgccggaaccggtaccgtcaccggatgaaatcgccgcctttaaacaggcgagagccgatgaactggcgctgctgagccggcgcagcccgaaagaggggtatgtgcctgtccataaatttgccacacaggatgcctggcggatcatgccggaagaatgcctgcttattgccggtgttctgactgatcacatgctggaagataacaatatggtggtcagtaatatcgcatcactgtgcaaaatcagtcacaaaacactggaatatgccctgagaggctggcgtgagtttaatttattcgcggcagaacacggcggttatcaggtttgctgatgattcagtaatttttgttacgcaagaataacaccagatatgaattgttacttctgaaactggtaaataaaattaattgctattgaagcaataatacataattagcaattaaaatcagtataaataactttgatggttattgataaaaattgtttatattgttttgtgcaaatatgaattttattaatggaaagaccggcgggttaccgtataatttttcatgagggatatgattaatagtgataaataattcattgtcacttatatttcctcccgtggtcgtcttactcttcttcatattgggagctttcaatatcgttatacagcggacagtatacggtatgcatgtatcggcaatactcgtcacttgtgtttcatgttgatctctgtttcgtgtgattaatcgcctgacgctgaccacgtcaggcgtttttttatctgaaaaggcgggggtcagaacagatcgcggtgaagggcgcggatgatatcttcggcatcattgccgggaaccagcaggcacatgttgtgtccgcttgcaccataactgatcatgcggatgttaaacggctcaagggcgctgaaaatcgttttgcccaagccgtgtgcacgggtcagttcattaccgataaccgcgaccagtgccagattctgctccacttcaatacggcacagtgcagacaactcggcggtcagctcatcactgagcaatgttccgttagtgtgtgtggaaccgacggtatccagcgtcagggcgatactgacttctgacgtggtgatcacatccacggaaatattatggcgggagagaatcgtgaagatttccgccagaaagccgcgcgcatgcagcattttcaggctgtgcagtgtcagcagggtttgctggcggcgtaatgtcagggcgcggaacagcggcggattcgggtcattatcacacaccagtgtgccgcccgcgccgctctctttgctggagccgacaaacaccgggattccgctgcgcacggcaggcagcaaagtggccggatgcaggatttttgccccgaagttcgccatttccgccgcttcatcaaaggtaatatgatcaatcggataggcatccgggacaatgcgcggatccgtggtgtagatccccggcacatccgtccagatatccacacgctggcagccgagcgcttccgccagcagtgccgcagtgtaatcactgccgccgcgtccgagcgtggtggtgcgccctgcggcttcgcagccgataaatccctgggtgataaccgggccctgtgacagacgcggggcaaggagctgatcacagcgcgtgcgcagcacagcggtatccggttcagcccggccgaagcagtcatttgtctgcatgacctcacggacatcaaaccattgcgcctgtgcgccctgctcccggagcacttcggtaaacagcagcgtcgacataatctcaccatgactgacaatctcatccaccagagcgctggaggttgccagtgccgctgcatccgataaagtggtgatattgcccagcaggcggtcaatctcattgtgcaccgccgcgttctccggcagacgggacaggatttcatattgtgtgtcacgaacctgtttcagacatttttcacgttgcgcgcgcgggcatccctgagctaattcgattaatgcattggtgatcccggcggaggcggataacaccaccagtgccacaccgggggtctgcagaacgaccccggcacttttctgcatggcgtcataatttgccacactggtaccaccgaattttgcaatgacctgctgagcaggcgcggaagatactgacgccataatgaattcccttatcccgtaaagtgaaaaatgtgagctgtgttacactgatagaattatcgggattgccggaatgagtcaatattgattaacggataatcaatatctttcataatgacaggcaaattatcgttttttgcgatattccgttccggcgctggttttgtttctgttttttgagcaatatcacggaatgacagatgcataacacctttatcgtcaggacagagtacactttgttgacacgattcagttttggttttcaatgaaaagagagctgcaatgaaaaatattaaccccactgatactgcggcctggaaggcgctggaacagcattacgacacaatgaaaactgtgcatctccgcgacttatttgcgcaggataacgaccggttcagccgtttttctgccacgttcggcgaagaaatgctggtggattattccaaaaaccgtatcacacaggaaacccttgataagctgctggcactggctgaagagtgtgatgtgcgtggggccgtctgcagtatgttttccggtgcgaagatcaaccggacagaaaaccgtgcggttctgcacaccgcgctgcgccaccgtgacaatactccggtgatgactgacgggcaggatgtgatgccagaggttcgcgccgtgctggaaaaaatgcgcgtgttcagtgagcggatcatcagcggggagtggaaaggctataccggcaggccgattaccgatgtggtgaatatcggtatcggcggctctgatctcggcccttatatggtgacagaggcgctgcgtccgtataaaaatcatctgggcatgcattttgtctctaatgttgacggtactcatatcgccgaaaccctgaaagcgctggatccggaaaccacactgtttctgatcgcctccaaaacttttaccacccaggaaaccatgactaacgcccattccgcgcgtgactggttcctggcggcggccaaagacccggcgcatgtggcgaagcactttgccgcgctgtccactaatgcggatgcagtagctgagtttggtattgataccgccaatatgtttgagttctgggactgggtcggcgggcgctattccctgtggtcggcgattggtctgtctatcgtgctctctgtcggttatgacaacttcacgcagttgctcgatggtgcgtatgccatggacaagcacttcaccgaaactgaattctcacagaatattccggtgctgctggcgctgattggtctgtggtacaacaatttcttcggtgcggaaacagaggcaattctgccttatgatcagtacatgcaccgctttgcggcctatttccagcagggcaatatggagtccaacgggaaatatgtggatcgtaacggtaaggtggtttctcatcagaccggtccggttatctggggtgagccaggcaccaacgggcagcatgcgttttatcagctgatccatcagggtaccaaactgatcccgtgtgattttatcgcaccggctcagagccataatccgctgggggatcatcacagcaaactgctgtcgaatttcttcgcgcagaccgaagcactggccttcggcaaaacccgtgaacaggtggatgcggagtttgccgcacagggcaaaaatccggttgaaatggattatgtcgcgccgtttaaagtctttgagggtaaccgcccgaccaactccatcctgctgaaatccattactccgttcagcctcggggctctgatcgccatgtatgagcataagatttttgttcagggcgtgattatgaatatctatacgtttgatcagtggggcgtcgaactgggcaaacagctggcaaaccgcattctgccggaactggcgggtgacaagccggttgagagccacgacagctcaaccaacggcctgattaaccggtttaaaaactggcgttagtgctgaatttactttaaccgtgcgttttataaacaaagccgctctgcataatgcagagcggctttgtttttagcaaaaaattttcagtaacgcgctcatttcctgccgggttttgttaaagtgtatcagaacgcatattatgcccctgataaccggatacattcatgacacaaacagtgataacaccccccatccgctggtttgataatgcggaaatgatccccgccggggtgctggactggttatcagaattagggtcaatgacgcggcgctttgaacagcactgcaatgaagtgacggtaaaaccgtattgtgaaaaatatatctcccgtgaagcgctgactgaagaagagcagatgcatctgcccggcagtgcacgctactggttacgggaggtggtgttatatggtgacggggttccctggctgaccggccggacagtggtaccggaggagacgctgacaggggaagagcagcagttactgaaaatgggaaatgtgccgctcgggcgctatctctttaccagcggttgtctgacgcgggattatatccgcttcgggctgtcagaaacccactgggcccgctgttcgcggttgtgcctggccggtaaaccgctgctgctgactgaagtttttctgccggcctctccggcataccccgcataagtgaatatctcggagaagaataacgtggaacgaagcatggtacgcagcaagtggcaggcatacagccgtctgatgcggacagaccgcccgattggctcactgttactgctctggccgacctactgggcgttatggatagcggcccggggtgtcccggactggcatattctgatcatctttaccattggcgtgttcagtatgcgagccgccggctgtgtgattaatgatttcgccgaccggaaatttgacggctcggtggaacgcaccaaaaaccgtccgctgccgcgcggtgatgtcacggaaaaagaagccaaaattctgtttgcggtactggtgctggtgtcattcggactggtactgacgctcaatacgatgaccatctggctgtcagtcgccgggctggcgctggcctgggtgtatccgtttgtgaagcgggtcagccatctgccgcaggtggtgctcggcgcggctttcggctggtcgattccgatggcgtttgcggcggtcagtgaatcgctgccggcagagtgctggctgctgtttgcggtcaatattgtctggtctgtggtgtatgacactcagtacgcgatggtggaccgcaacgacgacctgaaaatcggcgtgaaatccacggctatcctgttcgggcgctttgataagatgattatcggcatattgcagctggtaatgattctgatgctgttatggatagggctgatggttaatctgtccgggatcttctactggtccctgctgctggccggggcgttatttgtctatcagcagcggctgatggccgatcgcgaacgcgacccgtgttttcaggcctttatgaataataactatgtcgggtttattctgtttctcggcatgctggtcagttatctgtaagtgcagataaccggcaataaaaaaggagactggttatccggtctcctttttttgttctcagcgtcagtcagacggattactgtcgtcactttttgccggtacagcttcttccggctccaggctgacactttcgatagtcagacggacttccggtgacatcagctccgccagcacgttgtagaactctccggcgttggcttcaatcacatcatcattgtcattgatatagccttcttcacgcagtgtgccgaccagggtggcaaacacggctttgtcgaagaattccggtgcgttgataccgtgcagaactgacagacgctgtgccagcatccggctctctttttccagtgccgaacggctgatttccggggtggcattcagcagcgacagggtgatcgcataacgctgtaatgtctcgcggatcccagctgccagcagctgtaacggacggatacgggccgggttaatgaccagcatattatcatcacggcggcagattaattgctgacgacacagttcatcaatgatggtatcgaggatcgccggcagctcttcctgactgtaacgcataaacagttcggctttcagcagcggatagatcatcccgacatgttcacgcagagtatcggtgctgacgcggcggtgatggatcaggatactggtcaccagagacggcagtaccagcatatgcagaatgttattccggtagtaggtcatcagtaccgcattttcacgcggcagaatgatgatatcccctaggctgtctttctcaacctcgaacttgttcatctgcaatgcgtgttccagcagttcttccgcactcttcgccggggtggtgctgtccggggaatacggcacattgcgcagcagctggagatagcagtcgagctgttcgatcagctgttcgcgggtcagtgcgcgctgacgggaagccagcagagccgtggtacacaggttgatagcattcgcggcggcggcattattgatgctcaccataatgttatcagccagagatgttgcggttggtgtcagccaggacggacgctgcggctcgaccgggtcgatcgcctcacgccattccggtacctgttttgtcaggtattgtgacagcggaataggctgcccgaagttcacataaccctggccgaggttacgcagtttgcgcaggccgcgcaccatctgcataaaaccttctttttgcttggtggcaccgcgcagctctttggcgtaagtacccacttccatcacatgctcatagccgatatagaccggcaccagggtgataggtcgcgagtcaccgcgcagcatagcctgaagcgtcatcgataatgtgccggttttcggctccagcagacgtccggtacgggaacggccgccttcgacaaagtactcgatggaataaccgcgtgagaagagctcactcaggtattcacggaaaacggtggagtacagtttgttgcccttgaagctgcggcggataaagaaagcaccgaggcggcggaaaatcggtcccgccggccagaaattgaggttaatcccggcggcgatatgcggcggtaccagcccctgatgatagagcacataggagagcagcaggtagtccatgtggctgcggtggcagggcacatacactatctcatggccgtcctgtgccagctggcgcacccgctccgcattatggacattcagtccctgatagaggcggttccaggtccagccgaggacgcgatcagccacgcgcagggcgtcataggtgaagttagcggccacttcgttcatcatggaaacggcattctgacgtgctttttcaatggtgatttttttagctttcgcttcatcttcaacggctttttcaatcgctttggatttcagcagcttattgaacaactcctgacgcaccggcagtttcgggccgatagcggccatacgctggcgtgagaagtgaatacgggcgacacgggccagtttattagcgataatggtgtcagtaccgtgttcagaggccatcgcgcccatggacaccggctgtgagaagcggacaaaactgtcgcgtcccagccagagcacggcgaaaaatttctggatcccgtttaacagacgcagatgcggcacaccgtggtgtccctcgcggcccggtgaacgaccgaacatcacagagaccggcagcatctgaatatccagcgccggattattgcggtgcagatccagataggcgtggaaaatatggacggaatccttacgcggattcagggcgtaataacggaacacacgcgggccgtcatcgataaagacatagcccggtaatgtggtattaccgatgacattatcttccagcggatccggcatgccctgtgcgagacactgacggcgcagtgtcagcaggtccgccttagagtgataaggaagaacatagagtgtcggacgttgtgtatccagccccagctcattgaccggatccgtcgggatcggcttgctttttaccaatagttttaatggtaaattcaatacgttatagtatattttacgccaaagtgacataaatgtatgaagcctcttgttgacaattcgcgttcagcataccagaaaggcggagccagatctgtgttgcggcagcaataaaatcgcggaaaaatagcggcgatcagtcagataatcatattatttacagtgacagaaatgaaaaaaaataccggatttatacgattaattaaagcggcgggttattcaaagaaaggactcattgcggcatggaaaaatgaagccgctatccgtcaggaattgctggcgctgatcccggccgtcattattgcctttgctttctcttttacggcggttgaacgggtgctgctgattggttctgtggtgctggtagtggtgattgagcttatcaacagcgctattgaggctgtggttgaccgtatcggtacggaatatcatgaactgtccggccgggccaaagatatggggtccgccgcagtatttatcgccacattactggggctgtttgtctggattatgctgtttaccagctggttcctgcgtctttaacagacgattttttgtgaaacctgcggcgtaacacgtattttcctcatgttatggttcccaatcccggaatacctgtatatactcacagtctgactgtataaacaaacagggggcgaaatgaaagcactgacggcacggcagcaacaggtttatgaccttgttcgtgaccatatttcgcagacgggcatgccaccgacgcgtgcagaaattgcggcacgcctgggttttcgctctccgaatgcggcggaagagcacctgaaagccctggcgcgtaaaggcgtcattgagattgtctccggggcctcccgggggatccgtctgcttctggaagaagaagaggatgaaggtttaccactaataggccgtgtggccgcaggtgagcctttattagcacaggaacatatagaaagccgttatcagattgacccgatgctgtttaaaccaagtgcagattttctgctgcgggtaaatggtatgtcaatgaaagatatcggtattatggacggtgacttactcgcggtgcataaaacccaggacgtgcataatggccaggtggtggttgcccgtatcgaagatgaagtgacagtcaaacggtttaagaaagtgggcagcaagattgagctgcacgctgaaaacgaagaattcagcccgatcgtggtggatttacgggaacagaactttactgttgaaggtctggcagtgggtgtgatccgtaataacgactggcactgatttccgggacagccgcctgaaacggtatccgcttaaaaaccacagtacgccggagacggacactgtggtttttgtttttcagcgtccgcgtttacgcggttcgtcatgttcatggtcatgcaggcatttatctctgcgggtgcaggattcaatatcataacaagggcggcagtatccgtgcgcctcaatcacactgtggcggatatgaaattgcgcggcatccgccaactgagtgatttgtgaatcaatcgcctctccgtcccgctctgtcacactgttacagcgatcgcagataaacagtactgaagtatggctgggtttatcaaaatgcgggcacatcacaaagctgttggtggactcaattttgtggataaatccctgctccagcagaaattccagaccgcggtagattgtcggcggttttgcctgcggctcggtttcgcgcagcagatccagcagctcataagcactgatggctccgggctggccggcaatcagctgcagaatcgactttcgctgagacgtcatgcgcacactgcgtgacagacacagtgcttctgctttttttaataaagtctgaatatcaacagattgcatgacatcaccttccgctaatcaataaatatatgaacagcccactctaacatgaattccggcagaataaccggtatccgcgctattttgtcaaaaaagggctgccaattcagggcaaattatggtgagctgttggtgcaaacacataaaaagcacatgataataaaacggagtcctgaatgagtatcgaaacggttcgtgcctggttcggcacgcatgccccggatgttacgattattgagaccacacagccgactgccactgtcactcaggcagcagaagttcatggtgtccgccccggtcagatctgcaaaacactctcttttaagctgacggatgacagcgcgattctgattgtgatggcaggggacgcccggctggataataaaaaattcaaaacacagttcggctgcaaggccaaaatgctgaatgcagaggaagtggtgcatttcaccggccatccggtcgggggagtctgtccgttcgggctgccggtaccgctgaccgtttatgcggatcattcactccgtgagtatgacacggtattacctgcggcggggtcggctaattccgctgtccggctgacacctgcgcggctggcggaactgacaaacgcacagtggctggatgtaaccactcagccggtataaacagacagcaccgcatcagcggtgctgtcacacactcagtgttccggtggccgggtctccggctccgtatttacaccggcgtcggtactgcgggggataacgttatcatcatccggcaggtgctggcgggtaaagaacagcagactgtcttctataaagtagtaaggggagacgccgaagacctgggagatcctcagaataatttccagtgaaatttttgtgctgccgatttcgtaacgggagatttgctgttgtgatacaccaatcagattgcccagttctgttgatgtgactccggtgatcctgcgcattttgcggatttgcccgccgataagcttgtacatctcattaatgctggtgttcaggttattatctgttttattactcattatcatctgtcagtctggttaaacaataatatattaatgtttgtcaaattaaacttattcttcatcacaacccatttcatcaaaaaaataactaacactaatattcaggacgtctgcaagcattaacagtttatccagaggaattaagcttgctcccgtttcataacgggataactgctgttgtgagatattaatttttattgaaagctctttacctgtcagacagtttttcagtcgctgacattttattttgccgccaataaacattgccaactcatatttatcatatattgtcataaattatgaagataaacggttgtcattaataatgttaaaatttaacttgacgtatttatttcctcaaatagtttctttaaaaagtataatcgatacccttttaatatgtaatagatacaaaaaagcaacaaataagaaacaataaagacgagaatactacgtattaacactataacctcagcgatttcatgttgttacaaagaatacccggtttttaacatcttacatgaatgatgagtaagcggaatattctgatatttagtcgggattatacctaatataaagatattgatgctgattttgagttcaaaatgggtgatttaactaccttttcatgctttagcggaatgacagacaacccggaagtgtgattgttgtcttacaatatggctgaagatagtttgttaaattttctgagggcattatgagaaaatacaaaggttaaaatatctgaatatttccataaaatacataaaatcaggcgataatatttgtcagtaattgtattgatatgtgttattttgtttacttataaaataagtaatgctggcggaaatctattccttcattaaataaaaaattcaggttgattataatttcactatataatgaaatatacagcattgttttttcttttaattcacaggtttagttataagtgacggttgtaaaaaacaacaattacgtgtattttttgctgtcgtcaggtgatgagtgaaatttaacggtatgcggaatttattgcttttattgttagttatcgtgttattgggaccattgggtattgatctttatttaccggctattccggcaattgcaaaaggcctgggcagcagtgagtcattgattcagtcaactatctcgttgtttattcttgtattaggcgcaggccagctgatttccggatacctggtggataaattcggccgcagaccgatggcgatggcgggcatggtattgtatatcgccggttccctgacagctgcctttgcggtgactccggggatgtttatcgcatcccggttaattcagggagcgggtgtctgctgtacctcagtggttgcttttacctgtgtccgcgattgctttaacggcaacgaagcggcgcgtgctttcggttttttaaacgggacattaaatattgttccggcgctggcgccgctgctgggcggtattatggcggaatattacggctggcggctgccttttggtttcctggcgctgtatgcctttattctgctgattctgacagctaaatatctgccggaaacccgcccggaaagcagtgttcagcataaagagaacccgctgaagagcctcgtttctgtgttgttcagcaagcggtttttgatcttttccctggtgaatgccgggacaatgggaatggtattaacgtatgtttccctggctccggcggtactgatgggcgatgcggcactcagcccgttacagttttcggttgtgttcggtgctaacgggttctggataatggggatcagtatgatcgccaaccgggtgatccgcagagccggacgacctgtttgtctggtttccggtggtgtactgatggcgctggggtgcattgcgctggcactgagcccggtgctgttctccgcacaaatacagaatcactggctgatctatatgctgccggtggccgcagcctgtgccgggctggcctttattatgggaccggcaaccagctatgccctggagccttattctgataacgccggtgttgcctctgcactggtggggtttatgcagatggcgggcggcgcagtgctgacgctggttgctatcgcatcacccttaccgccgaaaactgcactggccgtcactatgctgtgcggcgccctgctggcatggaatgcgtaccgggtgagtaaaaaggaacagcggcaggcgtgatgcagaaagcggagatatcatacctctgtgatatactccgcctttgtttttctttctgactgatgtactgagatcccggatacaccatgcaccaaaacacaccaacagaaaaaaccactgaaaaccagcagttacgcaccactggcggctataagaaccttaaccgtttctccgtggcaccgatgctggactggactgatcgccattgccgttattttcaccgtaaactcagccgccacgcgctgctgtataccgaaatggtgaccactggggcgattctgttcgggaaaggggattatctggcgtataacgaagcggagcacccggttgcattgcaactcggcggcagtgacccggcggcactggctcagtgtgcgaaaatcgcacaggaacgcggttatgatgaaatcaacctgaatgtcggctgtccgtctgaccgtgtgcagaacggaatgttcggtgcctgtctgatggggaatgcttcattggtggcggattgtgtcgcagcgatgcgggatgtgacggatattcctgttaccgttaaaacccggatcgggattgatgatcaggacagttacgaatttttgtgtgattttgtcggtaccgtggcggagcgcggcggttgtgagatgtttgtcatccatgcccgtaaagcctggctctccggtctgagcccgaaagagaaccgtgagattccgccgctggattatcctcgtgtatatcaattgaaaaaagattttccgcatctgactatggcgcttaacggcgggataaaaacattggaagaggcgaaaacccatctgcagtatatggatggcgtgatggtcgggcgtgaggcatatcagaatccgtcaatcctggcacaggtggataatgccctgtttgatgcggcactgccggtgaccgatacggtcgcggcggtggaagcgatgtatccttatattgaggcggaactggcgacagggacttatctcggccatatcacccgccatatgctggggattttccaggggatcccgggggcgcgtcagtggcgtcgtcatctgagtgaaaatgcccataaagccggggcagatctgcgtgtgattgaagcggcactggaatttgttacccgaaaaaatataactgaataattatcagatgaataatgaactctctgaacagagagttcattttgtttcaattataatgaatcaaagaaacggttatagcatgcgatgatataactgatttgtgcattgaatgcgtctttgatttcgtctttctgttccggtgtttcagctttctttttcagaataaaaaagctttcctgcattaattgtacagtgacatctgcagatttttgaaatgcagataagctattgtttttaccgtaacattcaagaatggcatcaaagcgtttatccgcttcatcacgaatcatctggaattcagcgtttgtgattctatcatcctgatagatgaaatcaacaagatagtttatttccgtattattcataatcattccttttattagtgaaagagaaataagaataaatatccggtgttaaacaatcaataaaaataaatatacaaatttaatatgaaccagaggtatttattaataaaaaccctcatttaataacgagggtttttattattaattaaataatatatatcttaaggaattaagatactggatccggtcgttgcacggccttccaggcgtttgtgtgccagtgcggcgtctttcagcgggtaaacctgatccgcagggatggaaatagtcagcttgccgctcaggatcagatcaaaaattgccttgctggcttcgttaagctcttcgcggttggtgatgtaaccaaagacagaagggcgggtcacatacagtgagcctttcttatttaagatcccgaggtccacaccggtgaccgggccggaggcgttgccgtagctgaccatcaggccgcggcgcttcaggcagtccagtgacggcagccaggtgtctttaccgacagagtcatataccacaccgactttttcaccgtcagtgagtgccagcacccgctcaacaatgtcttctttattgtagttgatggtttcccaggcaccggcggctttggctttctgcgccttttcatcagagcccacggtaccgatcatcttcgcgcccagcgctttggcccactggcaggcgatttgtccgacaccaccggcagccgcgtggaacaggaagacttccccggcttttacctcataggttttgcgcagcagataaaacgcggtcagacctttcataaagcaggcagcagccgtttcaaagctgataccgtccggcagaatggcgagcttttcttccggcacgttatggatttcgctgtacgcacccagcggagactgtccataaactacgcggtcaccgactttaatgtgttttacgtttgcaccggttttcaccaccacaccagcggcttcagagccgacaccggaaggggataccggcgcagggtacaggccgctgcggaaataggtatcaatatagttcacaccgattgctttgttttccacctgaacttcacccggtgccggatctgccggcgtaaagtcacgataaaccagcacatcggtaccgccgggtgcatcaaattcaatacgtttagccatggagggaacctcattcggaaaaaaagagtgaccacttacctgcaaacagcgcagaaacagtaagcgggacagttaatcatatgatttattgtatttggcataattgcatgtcactgaaaattactcaagcttcgtgcaatcagcggcaaaggagggctatactacccgctctgtcccgttcagggacgcaggtattctccccggcagacgcactgataagtaagagagtttcatggccagatatcccaaggacaccaagaccgacaaaccccgtgaccatcagatggaagggctgaaattaccgccgcattccctggaagccgagcagtccgttctcggcggactgatgctggacaacgagcgttgggataatgtctctgaacgtgtgaccggcgaggattttttcagccgcccgcaccggacgattttcagtcagatgcagcgcctgctcgagcagggacggccgattgacctgatcactctgtctgaagcactggaaaccggcggcgagctggaaaatgtcggtggttttgcctatctggcagaactttcgaaaaatacgccaagtgcggcgaacattaatgcttatgctgatatcgtccgtgaacgtgcggtgatccgcgatatgatttctgtcgccaatgagatcgccgatgccggttacgatccgcaggggcgttccagtgaggatctgctcgatctggcggaatcccgcgtgttccagatcgccgaaaaccgtgccaataaagatgaagggccgaaggggatcgaggcgattctggaagaaaccgtcgagaagatcgaaaaactttatgctcagccgcatgacggggtgaccggggtatcgtccgggtatcaggatttggataaaaagaccgctggtctgcaaccttctgatttaattattgttgcggcgcgtccgtccatggggaaaaccaccttcgccatgaacctgtgtgaaaacgccgccatgaccgaagaaaaaccggtgctgattttcagcctcgagatgcccggcaaccagatcatgatgcgtatgctggcttccctttcccgcgttgaccagacccgtatccgtaccgggcagctcgatgatgaggactgggcgcgcatctccagcaccatgggtattctgctggaaaagcgcaatatgtatattgatgactcttccggcctgaccccgaccgaagtccgctcccgcgcacggcggattttccgtgagcacggcggcttaagcctgattatgatcgactacctgcaattaatgcgcgtaccgtctctctctgataaccgtaccctggaaatcgctgagatttcccgctccctgaaagcactggccaaagaattacaggtgccggtggttgcgctgtcccagttaaaccgtagtctggaacaacgtgccgataagcgtccggtaaactccgacctgcgtgaatccggctctatcgagcaggatgccgaccttattatgtttatttatcgtgacgaggtgtatcacgaaagcagtgatctgaaaggcgtggctgaaattattatcggtaagcagcgtaacggccctatcggaaccgtccgtctgaccttcaacggccagtggtcgcgttttgataactatgcagggccgagttatgacgatgaataaaccgtctgaatataatgcggacggaataataaccctgataacaaacaagacatcaacaacccctaaccaaggaacccctatgaaagcggcaacagccgtcattgaccgtggtgcgctgcgccacaactggcagcggatccgggaacttgcaccggacagccgtcatgttgcggtggtcaaagcaaacgcctacggccacggattagtcgaaatcgcccgtgaactcaatgaggcggacgcgtttgcggtggcgcgtctgagtgaagcgcacgcgttgcgcgccggtggtattgttaagcctatcatcttactggaaggttttttcgatgcggcggatttgccggtgattgttgccagtcgtctggaagtggcggttcattttgaagagcagttagtggcgctggagcaggcgcagttatcggatccggtgaaagtctggatgaaaattgataccggtatgcaccgtctcggcgtgcgtccggaagaagcggaagcgttttatcagcggctgtgccaatgcagaaacgtacagcagccggtgaatatcatcagccatttcagccgcgctgatgaagatgacgcacagccgacagaagcccaaatcacccgctttatggcatttgctgccgataaaccgggggaaaaatcgatttccgcgtccggcggcattctttactggccgcaggcacacctcgactgggtgcgccccgggatcattctgtacggtgtgtcaccgaaaagtggtaccgaagccggtgattacggcctgaaaccggtgatgaccctcaaatcccgcctgattgctgtgcgtaaacataaagccggggaagcggtcggttacggcggtacctgggtcagtgatcgtgatacctgtttgggtgtgatcgcggttggttacggtgacggctatccgcgcagtgcgccgtccggcacaccggtggtgattaacggacgccgtgttcccattgcggggcgtgtttccatggatatgataactatcgacctggggccggattgcagtgataaagcgggtgatgaagtcattttatggggggattcactgccggtggagcaaattgcagaagccagtggtatcagtgcctatgaactgatcaccaagctgacctcccgtgtggcaatggaatatctggacgaataaaatctgacgcgatatgttctgatagtgagaaaaattacaatcaggagtatcgcttgtgttcgaacatgtagacgcctacggcggcgacccgatcttaacgctcgttgagcatttcaaacaggatccccggaaggagaaggtcaatctcagtattggcctctattacgacgattccggggtgactccgcaactgaacagcatcacacaggcaaaacagcgctataacgcgcaggataccggagcctccctgtatctgccgatggaaggtttttccccttaccgcagcgcggtacagacgctgctgctgggcgatgacagcgggcttatccgcgaaggccgcgtggcgacgatccagaccctgggcggatccggtgcactgaagatcggtgcggatttcctgcaccgctacttcccgggatcggatgtctggctcagtgatccgacatgggaaaaccatcaggcgatctttgccggtgccggattcaaaactcattattatccgtattttgatccgcagaccaaaggcgtgaagtttgatgagatgctggcaacttttgagacgttaccggcaaaaagcgtcattttactgcatccgtgctgccataacccgaccggttccgatctgacaccggagcagtgggacaaagtcgtcgcggtggtgaaaaagcgggagctgatcccgttcctggatattgcttatcagggcttcggcggcggtatggaagaggatgcttatgctatccgcgccatggcggcggcagaggtaccgtgtttcgtcagtaactcgttctcaaaaattttctcactgtacggtgagcgtgtgggcgggttgtcagtcctctgcccgacacaacatgaagcagagcgggtgctgggtcagctgaaagcgggtgtgcgccgtgtctattccagtgcaccgtcttacggggcaaaactggtctctgaagtgctgaatgatactgcgctgaaagcacagtggctggcggaagtggacaccatgcgcagccggatcgcagagatgcggacagtgctggtgaatacactgaaaaacacattgccggagaagaactttgatcatcttctgcatcagcgcgggatgttcagttacactgggttcagtccggagcaggttaccgcactgcgtgagcagcatgcggtgtatctggtcggttccgggcgtgtctgtatggcgggggtgaaccgtcataatgtggatgcgattgcgcgggcttttgcggcggtcagccgttaatcctctgcaataaaatgatgatgcgcggaataattctgttccgcgcctgtctcagcgcaactgactgtctttactgccgcgccggttatagccgctgaatgcggcctgtttttttatctgcttctgcctgacaattcacacacaactgcacaccgggtattgcttcacgccgtgcctgcgggatcgggtcaccgcactcttcacaaaacagcgcgctttcccctgtcgccagctggctgcgcacccgcgcgaccgcatcatccagtgtggcatcaatctgctcctgaacagcagaatcacttgcccatccgcttgccatgtccgcctcctgtttccggtggttgcctgatactttattttatcacgggttgcttattatttcaccagcacggaaagcggacaaaaaaataccgcagcgaacgctgcggtattttcagaatcagaaaagattaatatcctcttttcaggatcggcttcaggaagcgggcggtgtgtgagcgttcacatgccgccacctcttccggggtaccggcgatcaggatttcaccgccgccgctgccgccttccggacctaaatccacaatccagtccgcagttttaatcacatcgaggttatgttcgataaccacaatactgttgccctggtcgcgcaactgatgcagtaccgccagcagttgttcgatatccgcgaagtgcagaccggtggtcggctcatcgaggatatagagtgtctgcccggtgccgcgtttggagagttccttcgccagtttcacccgctgcgcttcaccaccggagagggttgttgccgactgcccgaggcggatgtaagacagtccgacatccatcagggtctgtaatttacgcgccagcgccgggacgacatcgaagaattcgcgggcttcctcgatagtcatatccagcacttcgtggatatttttccctttgtatttcacttccagggtttcgcggttatagcgtttgcctttgcactggtcgcacggcacatacacatccggcaggaagtgcatttccactttcagtacgccgtcaccctgacaggcttcgcagcggccgcccttgacgttgaaactgaaccgtcccggtgtgtaaccgcgcgaacgggattccggtacgccggcaaacagttcgcggacaggcgtaaacacgccggtataggttgccgggtttgaacgtggtgtccggccgatcgggctctggtcgatatcgatcactttatcgaaatgttccagaccttcgacagacttatacggtgcaggcgtaatggtggtcgcgccgttgagttgtgtctgggcaatcgggaacagagtgtcattgatcagggtggatttccctgaaccggaaaccccggtgatacaggtaaacaggccgaccggcagattcagggtcacatttttcaggttgttgccgctggcaccggtgatggtcagcattttggccggatccgccacattacgtttttccgggatactgatccggcgttcgccgctgaggaatttcccggtcagggaatccggcgtgctgataatatcctccagtgacccctgggcgacaatctccccgccgtgaacacccgcgcccgggccgatatcgataatatgatcagcggcgcggatagcatcctcatcatgctccaccacaatcacggtattaccgagattgcgcagatgaatcagggtttccagcaggcggtcattgtcgcgctgatgaaggccgattgacggctcatccagcacatacatcacaccgaccagaccggcaccgatctgactggcaaggcggatacgctgtgcctcgccaccggacagagtttctgccgagcgggagagtgtcaggtaattcaggccgacgttaaccaggaatttcaggcgatcctgaatctctttcaggactttttcggcgatttttgcgcgctggccgctgaatttcaggttattaaagaaatccatcgcatgcccgatgctgaaatcagaaatctgcggcagcgtggtgttatcaacaaacacaaagcgggcttcttttttcagacgggtgccgccgcaggaaatacacgggcggttgctgatatatttggccagttcctcgcgcaccgccatggattccgtctctttataacggcgctccatattatgcagcacaccttcgaacggatgatgacggactgtcacatcaccccggtcattggaatatttaaactcaatggattcgcggcctgaaccgttgaggatcactttctgaattttggccggtaactctgaatacggggattcaatatcaaacttataatgatccgccagggacatcagcatctgataataatagaaattacggcgatcccagccgcggatagccccgccgccgagtgacagattcgggttctgtaccacgcgatcaggatcgaaaaactgctgcacgcccagaccgtcacaggtcgggcaggcacctgccgggttgttgaaggagaacaggcgcggctccagctcactcatgctgtatccgcagaccgggcaggcaaagttcgctgagaataccagttcttcggcgctgttatcttccatatcggcgataatggccgtaccgccggacagtgtcagtgcagtttcaaaggattctgccaggcgttgtgtcagatcatcccggactttgaaacggtcaaccaccacttcgatggtatgtttgatctgcagttccagtttcggcggatcagagagatcacaaatttccccgtcgatccgcgcacggatatagccctgtgccgccaggctatcgagcagtttggtgtgctcgcctttgcgctctttgacgaccggcgccagcagcatcaggcgtttgccttccggcagagtcagaacattgtccaccatctggctgactgtttgtgccgtcagcggaatatcgtgatccggacagcgcggctcacccacacgggcaaacagcagacgcagatagtcatgaatttcagtaattgtgcccacggtggaacgcgggttatgggaagtggatttctgctcgatggaaattgccggggaaagcccttcaatatgatccacatccggtttttccatcagcgacaggaactgacgtgcataggcggacagggattccacatagcggcgctgcccctcggcatagagtgtatcaaaggcaagggacgacttcccggagccggataaccccgtgataacaatcaatttatcacgtggaataatgaggttgatattcttcagattgtgggtgcgggcgccccgtatatcgatattatccatgtaccacttcccgggagtttcagatagcgaacaatttattcagcctgatattattgcacataattcactgaatggatatccagtatcagaagaaatctgtgtataatctcagcagcatttgcctgacagctgattgcattttgcgcagcagattttagagaagacacgcaaatctgcaaaggaaatcacggcaaaagattaccgtttcaaaaaagccactcagacgtgttagactagatccttatatgttttaaacaatttcatcgggagcatttcatggccagcagaggcgtcaacaaagtcattcttatcgggaacctgggtcaggatccggaagtgcgttacatgcctaacggcggtgcggttaccaacatcacactggcgacatcagaatcatggcgtgataaacaaaccggcgaaatgaaagagaaaaccgaatggcaccgtgtggtgatcttcggcaaactggcagaaattgccggtgaatatctgaaaaaaggttcacaggtttatatcgaaggttcactccagacccgcaaatggcaggatcagagcggccaggagcgttacaccactgaagtcgtggtgaatatcggcggcagcatgcagatgctgggcggccgcagcggcggtggcgacaatatgtctcagggcggcggctggggtcagccacagcagccacaacaatcccagcagttcagcggcggcggcaacccgcgcccggcacagcagccggcagcagcagcgccgcaaagcaatgaaccgccaatggatttcgatgacgatattccgttctgatccggatccgctgaaagtaccctgcatctgcggggtatttttttgcccggattttctgaccgcagcccggaacagacaaaaaaataccccttatgtcggtgacagtaaggggtgatgtctcatgccgttggatgaacacatgagattgcccggggttaacaggcagtgtagcttatgtttttataagtcctgtttttgtcctgttcgtctgatttttcatcataacgggtatttttattataagtgtctgcgtaatcggatgtatgtttgcgcttaattaaagaaaaacccaataaaatcattgggtatcaataagttatatactcaatttttataaaaatgcgataagaggcttaaagagcatgtgtcggattacgttttatcggtaaacctgaaacgtgacaatcacgatagtaattatatgtgatttaaatcacataaaaatggttgttttggcctgttttgtaatttcaatgtaattttaaagcttatttgtaacaaatgaatcacattaaaatgatgtttttttccggactggccggatgagtaaagccggacttttatcacattgagcaataaaactgataaagaaacggtttttagtgactgacagcgataatgtgaacacacgctgcttccggttatttcactgcaatatattccgctgcaatttccttaaattgagttttatagctccgcgttatgattacctttccttttttatcgctgttttccttgtgaaatagtgctgtttcacactgctgaagtaaattggatattttaatatgtatttataaatcaatttgttagttgtttttgggttttatggcagtgatttatcagtgatggcgatcacaattcagcggctgaataaaaaataaatgaaaaaaggcttgtacagatttcattcttatgtttttttaaagtacgaaccgaatttattcatacacaatttactgttgagagatatcccgtgaaaccattcacccgtccgcaaaacgtactactaacaaccgcgctatcagacgcggttgtcgtcgtgcgtgtggtagtggtggtggtcgtcggcagcgcgccgtaacgggctgggatcagcaacaggatcactaaccccgccggcgtaaaccgagcggggtttttttatgtcaggctccgcgaaactgaaccggttgttaagaaaaggatgatgttatgggagcttcacagcagactcaggcaaaaacccggatgacgggggcggaattaattatccgcatgttagaacagcacgggatcacctctgtgtccggtatcccgggcggggcggcactgccgctgtatgatgcgctgggcaacagccggatccggcatatcctcgcccgtcacgagcagggcgccgggtttatcgcacagggtatcgcccgcaccaccggcaaagcggcagtgtgtatctcctccagcgggccgggtgcgaccaacctgatgaccgccattgcggacgccaaactggattccgttccgctggtctgtatcaccgcccaggtctcctcgccgatgatcggtaccgatgccttccaggaagtggacacttacggcatgtctatccctatcaccaaacacaactatctggtgcgcaatgttcaggatctgccgggcattatcgccgatgcattccgtattgcggaatccggccgtccgggaccggtctgggtggatgtgccgaaagatgttcaggcagccatcattgagattgatgaattaccgccaatcatgccgaaagatccgctgccgctgtttgatgcggaaaaagtcactgaagctgccgcgatgattaatcaggcaaaacgcccgattctgtatatcggcggcggtattgtggcttcgcagtcccagcagctggtacagagcttcgccgagcgtgccgggttgccgaccaccatgacactgatgggattaggcaccatcccgcagcagcatccgctctatctggggatgctgggcatgcacggtgcgcgttataccaatataattttgcaggaatcggatttgctgattgtggtcggggcacgctttgatgaccgcgcgataggtaaggcggagcagttctgtccggatgccaaaattattcatgtggatatcgaccgcgcggagatcagcaagatcaaacaaccggatatcgcgatcaacgcggatgccggacaggtgctcgccatgctgctgccgcagattgaggtgaatgcccgtcagacgtggaacgatcatatcgcgcagatcaaacaggagttcccgctggagcagattaataaatccgatccgttaagccatttcggactgatcgccgctgtggcggatgcggtggataatgatgccatcatcaccaccgatgtcggtcagcaccagatgtgggtggcgcaggcgtatccgttatgccgtccgcgtcagtggctgacctccggcgggctcggaacgatgggctttgggttaccggcggcgattggtgccgcactggcagagccgtcacgcaagatcgtctgcttcaccggagacggcagtattatgatgaatatccaggagatggcgaccgccgccgagcataatctggatatcaaaattattctgatgaacaaccaggcgctggggatggttcaccagcagcagacactgatgttcaacgagcacattgtggcatctgcctatccgtatcagactgattttgtgacaattgccaaaggcttcggattacacacctgtgatctgaataaagagagtgatccgcatgctgcattgcaggcggcgattgatcgccccggaccgtgtctgatccacgcattaatcgatgtcagtgaaaaagtgtggccgatggtattgccgggtgatgccaatatcgatatggtcacagcctgatgacggagaacagaatcatggaaaaaaataatcagcctatcgctctggaactggtggtccgcaaccaccccggtgttatgacacacatttgcggtctgtttgcccgccgggcgtttaacgtggacggtattctgtgtctgccgctgccgggacaggatcacagccatatctggctgctggtgaaatcggatgatcggctaagccagatggtcagtcaggtggaaaaactggaagacgtgcaggacgtgaagtacaacgaagacatcagtatctttgagcaactgaataaatacattcagtagaatgatgaaaccgggcagataagcccggttttttgtctgcggttacggcgatgtctggccgatatgggaataggacataatcagcgtgccgctcagctcaccttccatacagatataagagtggggaatatcacaggagaacgcatagaaatcccccggttccagcagcacagtctgatcttcattaaagcgcatcatcagcgtaccctgatggataagaatatgctcatgggtgccggtgctgtgcgcggggctgttaataatcgcaccgcggatcatcttcaggtgccagatctccgaaatattccccatgccgacacggaatttaaaatcttccgcatattcccctttaaagactttatttttttcgtaacggggataaccttcattactggcggtaaacagatcccccagcggaaaacgcagtgcgacggcaatggcctccagtgtatcgatacgcggattggaatcaccggattccagtttggacagcgcggctttcgagatgccggagagttttgaaagatcattgagcgacaggttacgcgcctgacgcagcagtttgaccttctggccgatgtgggcactggtttttagcataatgtaattgataccaatgaaatttgcagggaaaccctgttagtattgcacacttgttgtacaacggtaagccgtgattttccggaaaaacaggtctgacaggtgatactatcagatgaaagcgtccggcatggtgataattaacatatgtcattaaacgggtgctcaccatgatctataccctgccatgggcagattttttcatctgttttacggttctcttcttcggttatctggtcttcggcatggtcggcttcggctctgcgctgatctcaagtccggtactggccttttttattcctgtctcacacattgtgccgatgctggcgctgatggatctgggcgcagcggtgattaacgtcacccgcgacgggcgcaaagccgattttgccgagctgaaatggatggtgccgctgatgataggcggcagcctgattggtgcggcgatccttctgaaaacacatccggatttgctggccgtgttcctcggcgcttttattgttctctatgcactctattccctctttattaaaaaggcggtgcggcattacccgcagaaatacattattccgttcgggatcggcggcggtattctgagtgcgctgttcggggcaggcgggtttgtctatgccatctattttgccgggcggattgaggataaaaaccgcttccgcatcacgcagactaccctgatcggcttcagtacattaacccgcgtgattattttcctgattatggggatctactggaacagtgaaatcgccattaccgcgctgctgtttgtgcctgcaatggtcgcgggaattgtcctcggacggcatatcaccatgcgcatcccgaaagaggcatttttccgttttctgaatatggtgatcctgctggccgggctgacgttgcttatcagcaacctcgtgcactgacagtcgtcagcgcagtatttttttagcacattgccgggcacgcagctgttcgtccggggttttactcttactgaagcagtcacggtaacgggcggcataggtactgtattgcgcctgtgcctccggcagcggcagggacagcagatgattgataaaggtaaaactgccgatctctgcgtgctgataatccaccgggtttttccattccccgccccagcggagaaaaccgtgactgaaaaccagcggcagcacggtttccatttttccgttacgaatattttctctgttggtcagcgccgcagcagattgcggcggactgatggtcacacggctgtttttgtcgcggaagcggtaagggttttgctgcggattaatgtcgatcgccatgccgtaagcgtgttttgaccaggccttctgacttgcctgacggcgaccgttaaatgctgacgtattattggcggccatggatgcctcatcatcgccgccgaaggtctctatcggcagcacactatgcagcgggaatttttgccggtacaactcatcaaaaagcgcttccgtttcgggggcaataatatcggcgacagtaatggtgccggtgcgggtttcgccctcaaaggtgataaaccggacatccacattgaccagccgttcacagggcaccgggttttccggcgtgataatacccagcgctgtcatggcgcggcaggtgtccgggctgagcggggtgatcgccgcctgtgctgccggtaatgcagaacagagcaggctcacagggaggagaaaagcggtcagtttcatcatctattccgtcatcaggcaccgggacggatgatgataacccgtcagcggcacagaggtgaaaaaattcccggatttggccttgattatcaggatttttcctaagataatcgtttgcctcaaaaaatcacatcttttctctgtaaaaagccaaacgtttgcgtcgtgtgtgtccggtttttctatccggaaaccgtcggattttttctgaaaacgcaatcgtttacgtgatgtgacacaaaattcattaacacaggtgatgacatgtctgcgacacagccgcaaagcgggtgcaaattagaccaattttttaaactgactgagcgcggcactactgtccgccgtgaagttctggccgggctgaccacattcctggcgatggtgtactctgtgattgttgtgccgggcatgctcggccaggcggggttcccgcatacggcggtctttatcgccacctgtctggtggccgggttcggctccctgctgatggggttgtgggcaaatctgccgatggctatcggctgtgcgatttccctgaccgcctttaccgcattcagcatggtacttggtcagaatatcccgatcccggtcgtactgggcgcggtcttcctgatgggggtgctgtttaccctgatctctgtcaccggtatccggacatggattttgcgcaatatcccgatgggtattgcccacggcacggggattggtatcggtctgttcctgctgctgatcgccgccaccaatattgaccttgtggttaaaaacccgggcgcgggcatgccggtgttgctgggggatttcacctctttcccggtgatgattgcactggctggcctggcggtgattttcggcctggaacgtctgaaagtgccgggtgcagtactgctggtgattattgcgatttccgttatcgggctgatttttgacccgaatgtgaaatatcagggcttcttcaaactgccatccctcggtgatgacgggctgtcactctttttcagcatggatatcatgggcgcactgaagccggtggttctgccgacggtactggcgctggttatgacagcggtgtttgatgcgacaggcactatccgtgcggtcgccggtcaggcgaatctgctggataaagataatcagatcattaacggcggtaaagccctgacgacagactcggtcagcagcattgtggccggtgttgtcggcgcggcgcctgcggcggtgtatatcgaatctgcggccggtgccgcggcgggtggccgtaccgggctgaccgcaaccgtggtcggggtgctgttcctgctgatcctgttcctctctccgctctcttatctggttccggcctatgccacggcaccggcgctgatgtatgtcggcctgctgatgctgagcaatgtcagcaaactggatttcggtgactttgtcggctccatgtccggtctgctgtgtgcggtgtttattgttctgaccagtaacattgtgaccgggattatgctgggctttgcctcactggttatcggccgtatcgccgggggtgaatggcgtaagctgaatatcggcactgttcttatcgcagcggcactggtggcgttttatgctggcggctgggcaatttaagtgataaatcaccacttaacggatgctggtggtgacgatacgctttatttatacgatttgtctcaaaatactaattaattgcccgaattaatggcctgagaagataaaatagcagtggcggataacgcatccgccgctgctttttttgtatgatagtggcaaccggcggtaattttttctcctccggggtcttattgcggtttttttgccgttattaacagtatctttttgtcagcgggctgatgaagccctaagttcagtaagggtaatatggaaatattctttacgattcttattttgattctggtcgtgtcggtgtccggtgttctcaccaaaatgatcccgtatcgtattccgttacccatcattcagatcgcgatgggggctctgcttgccttcccgcagtttggtctgcatgtcacgttcgaccctgaactgtttctcgtcctgctgataccgccgttgctgtttgttgacggctggaaaaccccgacccgggaatttatgcagaaagggcgggaaattttcatcctggtgctgttcctggtgctggtcactgttatcggtatcgggtatctgatctactggctgatgccggggattgagctgatcccggcctttgcccttgcggcggtgttgtctccgacagatgccgtggcgttgtcgtcgattgtcggcaaagggcgcattccgaaacagatgatgggcattctggaaggggaggcactgatgaatgacgcctccggcctggtcgcgctgaaatttgccgtggcgattgtcatgggcacgatgattttctccgtcaccggtgtcacgctggaattcttcaaagtcgcaatcggcggcctgctggcgggggtggcagttacctggctgtacagtaagtcgctgcgcctgatgagccgctggagcggggatgacccggccacgcaaatcgtctttatgttactgctgccgttcgcctcttatctgattgcggaacacatcggtgtgtccggtatcctggcggccgtggcggcggggatgaccatcagtaaatccggagttatccgcaatgcgccgctggcgatgcgtctgcgggcggataatgtctggggaatgctggaattcgtctttaacggtctggtctttattatgctcggcctgcagttgccgggaatttggcaggtgtcggtgattgaggcggagctggatccgaccgtcgaaacctggatgctgtttaccgccgttatcgttatctattttgctctgctggtgctgcgtttctgctggctgtggatgatgaaaaccgtcagccgcctgaccttaaaacgcaaaccgctggatttcaccttctacaccacccgtgaactgtggctggcatcatttgccggggtgcgcggggcgataaccctggcaggtgtgctctctatcccgctgttcctgccggacggcacaccgttcccggcgcgttatcagatggtgtttatcgccgccggggtgattatcttctcgctctttatgggagtggtatcgctgccgttcctgctcaaagggatgcatgtcggggataaacaggcggatgccaatgaaatccgtgcggcgaaagcggcgatggcggaagtggcaattgtcagtatcggcaagatggaagagcgtctgtccgccagttcagatgaggcactggatgcggaagctatcagtgaagtggcctccagggtggccgggcatctcaggcggcgtactgccggtgatgatgagatggaatataatctccaggtggaagatctggaacgccgtttccgtctgaccgcactgcgtgccgagcgcggggagctgtatcaccagcgtgcgacccgtaatatcagcaatgaaaccctgcagctgctgctgcatgacctggatctgctggaagccctgctggttgagaaagaaacataaccgatgccgttactgattattaccacaattctgtgggccgcatcgttcagcctgattggcgagtatctcgccggtcaggtggacagctggttctctgtgttagtccgtgtgtcgctggcggcactggtttttctgccgtttctgcgctggcgcgggatcgccccgaaagtcattctgatgtatatggcggtgggcgcctgtcagctcggcattatgtatctctttgttttccatgcctacaactacctgaccgttgcggaattcctgctgtttaccgtgctgacacccttgtatgtgacactgatttatgacctgctggagcggcgtggtctgcgctggggttatgtgttcagttcgctgctggcggtgattggtgcggcggtgatccgctatgatcatctcagtgattctttctggacggggctgattctggtacagctggcgaatatcttctttgccatcggtcaggtcggttacaagcggctgatggaagtgcatccgctggtgcagcgcacggcgttttcctggttctacctcggtgcctgtgtggtggcgctggcgggctggctgctgttcggtaatttcgccaaaataccgtccacgcagttacagtggggtgtcctgctgtggctgggaataggtgcttccggaatcggctactttatgtggaactacggcgccacacaggtggacgccggaacactcgcgatcatgaacaacatgatggttccggcgggattactggtgaactttgccatctggcagcagcatccaaactggctcacgttcagcattggcgcaaccctgattgtggcatccctgtgggtgcaccgggtatggatactgaagccgtctttacaaaaggcagattgtccaccgcgtgctgacgcgtcgcgcgaataaacgactcaacagccggctggcgctgttccccgctgcggtttgcggcatacagccggctccacaatccttcacctaaggttttggtcaccaccattccctgtctttcaaaattctccaccgcccagtgcggcagtgcggcgatccccatgcgggcggcgaccatctggatcatcagcagggtgttatccacggtttttatctgaggggaaacaccggccggttgcaggaaacgccgccagatatcaaagcgctgacgctgtaccggataaatcagcagggtttctgcagtcagatcctgcggctggatatgcagacggcgggccagcggatgatccggcgccatcaccagctttacctcataatcaaacagcggcgtgtatgtcagcttcccgttgtgctgctcatcaatatcggatgtcagcaccacatcgagttcgcgtttcagcagttccggctgcggatcaaaactgaccccggaagtgaaatcgacattaatctgcggccagctctcgcggaaatgcgccagagcgggggtcagccactgaatgcagctgtggcactcaatcgccacgcgcagcgcggtcagtcccggctcattgcattcacggatagcatctttcaccagcggcagcacctgctccgccagctgtaacaacacctgtccctgcggggtgaattgcagcggctgggttttgcggataaaaatccggtagccgagccggtgctccagttcactgaactgatgggaaagggcggattgtgtctgatgcaacgcacctgctgctcccgcgagcgaccctgactgattcagtgcctgaatcgtttttaaatgttttatttctatcatgaggaaccttcaggttagcgatgaagaatttgcgcttgtttcttatacagtacccgttgattatggatgtgtaaacatctggatggctaaatgataggattttttatgacgacacataatcacactctgggttttccgcgcatcggtctgaaaagagaactgaaaaaagcgcttgaaggttactgggcaggacagatttcacaggatgagctgcgcgataacggccgtgaattacgccgccgtcactggcagctgcaaaaagaggccggggttgaattattaccggtcggggatttcgcctggtacgatcatgttctcggcaccagcctgctgttcggtaatgtgccaccacgccatgccggtgccgacgggaaaattgacctcgataccctgttccgtattgcccgcggccgtgcaccttccggtgaaccggcggctgcggcggaaatgaccaaatggtttaataccaactatcactacattgtgccggagtttcagcgcgggcaaaccttcaccgtgagctggccgcagctgtttgacgaggtggatgaggcgctggagcagggctttgcggttaaaccggtgctgctcggcccggtaacctatctgtggctcggcaaagtgaaaggggctcagtttgaccgcttatcattactgccgtcactgtcagaagcctataaaaacgtgctggaaaagctggcgcagcgcggtattgagtggattcagattgatgaaccggctctggtgctggatctgccgccggagtggcaggatgcttaccgtacggcatatgatgctttgcagggacatgcaaaactgctgctgaccacttattttgacggagtaagccatcacttaccgctgatccgtgagttaccggtgcaggggctgcacgtcgattttgtcgcgggcagtgatgatattcaggccatccacgacgcattaccggccgactggctgctctctgccggcctgattaacgggcgcaacgtctggcgtgccgatctgcggcagaaatatgatgtaatcgccccgctggccggaaaacgtgacctgtggatcgggacatcctgctcattgcttcacagcccgattgacctgcgtgatgaaaccaaactggatgaagaagtcaaaagctggtttgccttcgcacagcagaaatgtgaggaactggcattgctgacccgcgcggtcaatagcggctcggcagatgatatcgccgcgctggcggaatacagtgccccgattacccgccgccgtgattcttcccgtgttcacaatgctgcggtggctgcccggctggcggcggtaaccgcccgcgacagcgaacgcgccgcgccgtatgccgaacgcgcagaggaacagcgccgccgttttaacctgccgctgtggccgaccaccacaatcggatctttcccgcaaaccacggaaatccgcgggctgcgtctgaacttcaaaaaagggaatatcgataaagcgttctaccgcactaatatctctgaacatattaagcaggcgattaatgagcaggaacggctcggactggatgtgctggttcacggcgaagcggaacgtaatgacatggtggagtatttcggcgagcatctcgacggctatgtctttacgcagaacggctgggtgcagagctacggctcgcgctgtgtgaaaccgccggtgattatcggtgatatcagccgtccggaaccgatcaccgttgactgggcgacctacgcgcaatccctcaccagcaagccggtgaaaggcatgctgaccgggccggtgaccattctctgctggtcattcccgcgcgaggatgtcagccgtgaaaccattgccaaacagattgctctggcactgcgtgatgaagtggacgatttgcagaaagccgggatcggtattatccagatagatgaaccggcactgcgcgaagggctgccgctgcgccgggcagaatgggcggagtatctcacctgggcggtggatgccttccggctgaatgcggcggtcgcggaaaatgacactcagatccacacccatatgtgttactgcgaattcaatgacatcatggattctattgcggcgctggatgcggatgtgatcaccattgaaacatcacgttcggatatggaactgctggaagcatttgaagacttcgattatccgaatgaaatcgggccgggtgtttatgatattcactcgccgaatgtgccggaagtggagtggattgaagccctgctgcgcaaagcgtcggataagattgcggtggagcgtctgtgggttaacccggactgcggcctgaaaacacgcggctgggatgaaacccgcaaagccctggcgaacatggtggaagcggcgcgccgtctgcgggaaaatccgctgacatcccgctgagtttatttatatataaagaagaaaaaagccggtcagtaatgaccggctttgtgttatgtgctgtcagctgaccggacggaaatccggcccgctgaagcagcgtgtcgcccggccgcgctcgatctggtgatgtgaccggtggcgctcgccgttcagtgatgcggactgctgttgctgatattggctcagatgccattcaatcaggcggcaggccagttttttgttggcgtgctggctgcgttcagactgcactttaaccgagataccggtggcaatgtgcgtggcacggacagcggattctgtcttattcacatgctggccgcccggcccctgtgatttcagacgttcaaagacaatctcactgtctgatactgcctgcggtgcagtaaaacgacggatgccgataaaccagtttttacgccggtgtttcgggcggagcgggctggcacactgccactgcaatgtcccgcaccagcgatccgccagagcatccgcatgttctccgtccagtgacagcagggcggaatgcaggccgtgctgtgacggcatttcctccgcaaagatcactgtgaccgacgactgtgcagcctcctgcaaaaagaggcgcagcgcgtgcttcaccgccagacagcactcttccgggccgtgagcggcagaaaactgtaataacatcagcagcactccccgctcgttttgtaggtcagcaacggtttcagccgcgccaccacggtaatcagcccggcacctgacaggctttcaatcacagtctcaatggatttataggactgcggtgcttcctcataaatcagctgcttattagcgcagatcacccggctgccgagatcggtacgggataactgcgccggggtatagcggtgagaaaggcgtcctttgcactcggtgcgcatccatttacgtcccgcgccgtgcgcgagagagtaaaggctgtcagcggttgcatgtggtttcaccagataactgtaatcaccgcgtgagccggggatcaccacataatcatgatccaccggggttgcccctttccggtgcagccagccgttacggccgttcaccgtgcaggcttccaccaggttgtgattgatatcgagtattgcctcaccgttggtacgcagctgctgcatcatccgcagtgcaatcagcacccggttgtgctgtgcaaaatccagcgcctgctgatgtgctgccagatattccgtcgcttccggcgtgttctctgtcagcccgtcgtggctgaactgctcaacatgatgacgcagaaccatttgccccagcccgcgtgaaccgctgtgaaccagcagcaccatacgctgtttatccagcccggacgcggcaaacaggccgtcatcacagactttatcgatttgctgaaactcagcaaaatgatttccgccgccgacagaagacagagaagcggcaaacggatgtgatgcgaagtgatcgctcacatgctctgccagccagtctgcgtccgcatggtcatgcatgctgcgcagttgcttttcagctttgtctgcgttgagtttgctgactttcagctcagtctgatacagcgccataccgcagccgatgtcgttaccgaccagcgcgggataaaaacggccttcagagaaaaatgccgcacccaccggatagcctctgccgggatgcagatccggcataccggcaacagccgtcatacccggtaattgtgcggtggtgatcagttgttgaatcgcgttactttcgatccacgtcgcatccgaggcgatataagagacgcccggcgcgacaaaatgcatataattgcccataatccattccggaaaatagtgaaaattcgggtttatggcgggcagtcaggaagaaacagagaggtaacagggacgggtaatacggagaaataacgctgtaataccggtgtgataatcagttctgcaagagcccgcaaagagtgcacagtaatgttgtcatatgaacctccttacgttctgaaagtgattgtcagcacgcatcgcgtgccggaatggtgcggatagtagagtgaggcggataaaaaatcaacctgtgttttgttttttcagagagcagtacggtgacattttcagcataaaccgttgtttatgtgatttgaatctcatttttatgtaattgattcatcgtcatgtatcaatgaagtgataataatcactaaattttgtgtggtgacacgttacagtgtcctcaataatcattttttcgctaaggagttcaggatggctgatgtatttcatttaggtttgactaaagcagatttacagggtgcgacgctggctatcgtaccgggcgatccgaaccgggtcgaaaaaattgcccgcctgatggataatcctgttcatctcgcgtctctgcgtgaattcacctcatggcgcggcgaactggacggcaaagcggtcatcgtctgctcaaccggtatcggcggcccgtccacctctatcgcggtggaagaactggcccaactggggatccgcacattcctgcgtatcggtaccaccggtgcgattcaggaaaacatcaatgtcggtgatgtccttgtgaccacggcggctgtgcgcctggatggtgcaagtctgcatttcgcgccgatggaattcccggccgtggctgactttgaatgtaccaccgcgctggtcaatgcggcgaaagcagccaaagcaacagttcatattggtgtgaccgcttcttctgatactttctatccgggccaggagcgttatgataccttcagcggccgtgtgacccgccggttcaaaggatcaatgaaagagtggcaggaaatgggcgtgatgaactttgaaatggaatccgccacactgctgaccatgtgtgccagccaggggctgcgtgccgggatggttgcgggcgttatcgttaaccgcacccagcaggaaattcctgatgaagcgaagatgaagaaaaccgaatccaataccctggatattgtggtggaagccgcccgtcatctcatctgatcgtcaccggtttcatgaatcaagccgtatcgccgggttttccggtgatgcggcttttttttaatcattcattctgtaaatctgatacagtgatcgtgccgaacatactgataataatgataaagaggtatcaatgaccagacagccattaccgcatccttccgtactgccgctcgacggcgggatcaatttccgtgacctgggaaacaaagtgctgccggacggcagtaaaatcaaacccggcctgctgttccgcgccggggcgctggatcgcctgagcgacaacgacttaacccgcctgacagagcagaatctgtttcagatcctggattaccgcgacagcggcgaaattgctgataaaccggatcgtctctggaatggcgcgctgtacacgaacgcaccggcaaatccgatgtcaaaggaagtggatgctaaccttgagaaactcggcaatgaagcgctgacggagtttgatccgaaagcctttatgctgcgcctctatgaactgctgccgctgggcaaccctgcgtatcatgcactcggcgatatgctgcgcaacccggaaaaaggcggcattgtgcagcactgtgcggtcggtaaagaccggaccggtgtgggttcggcactggtgctgtttgcactcggcgcggataccgatatggtgatggaagattacctgctgaccaataacacgctggcaccttaccgccatgaactgctggcggaacacgcgaaaaccatgtcggaagcggtggtggataaattcgcctatgtttactccgtacagcctgatttcctgaataccgcactgaaaagtattcactctcattatggcagtattgatacctggctggcgaaagatatcgggctgacaacagcagtccgcgacaaaatccgcaaccatttccttgagtaatatcagacaataagggggattttctggcaccggcagatattatcaccaccgttaccgcatttgtccgtgaacatgagatctgggcattgccgatcgttttcgtgctggcattcggtgaatctctcgcattcctttccctgttgtttccggcaacagtgattctgctcggagtcggggcgctgatcggggagggagggctgaattttctgccggtcttcctcgcggcggccaccggtggctttttcggcgactggatctcctattacatcggctactactacaaggataatgtccgtcatatgtggccaatttcccgctcgccgcaaactctggtcagagggcatcagttctttgagaaatggggaatatggggtgtctttttcgggcgcttcttcgggccgttccgtgcggtggtaccgctggtggccgggatctgtgcaatgccgcagcgtcattttcagctggcgaacctgtcttctgccgtgatctgggcattcggcctgctggcccccggcgcgttcgggctgaaatggatggccgggctgatgggcggatagcgccgcattttcaccggattacattgatttttgcgtgacgcgccgaaaaaaacggcggacagcaaaaagacagtggacatctgtacagtgctattttaccgtaagcggcgtaagtgactcgcggaggagacggccatcgtggatattcagtggctttatggttttatcggcattctgagcggtattctgctgggcggcggtgtggtctggttcagtctgcaacagcggctggcggacaaaaaccggctgttacaggataatattgcgcaactggctctgctggatgaaacccggcgtcaggctgcatactggcagcaggccagggagcagagtgaacagtcactggaaaatgcccgtcatatcagtgcacaacaggaagcggaaatccgtgagctgaccacccggctggaagaaagccgcctggccgccgaagaaaaacagcggttgctgcttaacagtgagcagcgcctgaatactcagtttgaaaacctggccgcccgtatttttgaacagagcggccgccggacagatgaactcaaccgccagagcctgtccatgctgctgcgcccgttccgtgaacagctggataactttaaccggcaggtgcaggaaagttacagccaggaaagccgcgagcgccacactctgacacatgaaattcagcgcctgcagcagctcaatctgcggatggcgcaggaagccgtcaatctcaccaatgccctgaaaggcgacaacaaaatgcaggggaactggggggaaactattcttgcccgtatcctggaagcctccggtctgcgcgaggggcatgaattcgccactcaggtcagtctgaaaaatgaacagcaaagccgttatcagcccgatgtggtgatttacctgccgcagaacaaacaggtgattgtggatgccaaagtatcgctggtggcctacgagcgttacttcaacagtgacaccccggaagcccggcagacggcactgacggaacatatcaactctgtgcgtcagcatatccgcggcctgagccgcaaagaatatcaggatctcagcgggattaactcgctggattatgtactgatgtttatcccggttgaaccggcgtttctggcggcggtcgggcaggagagtgtattgctggatgaagccctcagaagcaatatcatgctggtcagcccgtccacactgctggtggcgctgcggacaatcgccaatctctggcgttatgaacatcagcatgaaaacagtcaggcaattgcacagcgtgccgcccgtctctatgacaaactccgcctgtttaccgaggaaatggacggtatcggccaggcgctggataaagcccagaatacctatcacggggcgatgaaaaaactgaccaccggccggggaaatctgctgtcacaggcagaaagcttccgtgagctgggcgttgaggtaaaacgcccgctggatgaaattctggtgcagaaagcccgtctcagtgaacagcaggataccgctgcggatgaactgccggaggagcaggctaatttcgcagaacaacacaatgggcatagggttttgcggtaaaggctgatacacttttccgatcactaattcatgcacacaggcaaaacaggcaagaagagaatggaagagcaatcccgggatacaatcgattttggttttcgtactgttaacagaaacgaaaaagcaggtatggtggcaaacgtctttcattctgttgccgcaaaatacgatctgatgaatgacctgatgtctttcggcatccatcgtgtctggaaacgttttactattgatgccagtggtgtccgccgtggtcagcgggtgctggatcttgccgggggaaccggtgatttcactgcaaaattctcccgtatggtcggcgaaaatggtcaggtgatcctcgcggatatcaacgattccatgctgaaaatgggccgggaaaagctgcgtaaccacggggttgtcggcaatgtgaattatgttcaggcgaacgccgaagaactgccgttcccggatgactacttcaactgcatcatcatctctttcgggctgcgcaatgtcaccgataaagacaaagcactccgttccatgttccgtgtgttaaaaccgggcggccgcctgctggtgctggaattctccaaaccggtgattgaaccgctgagtaaagtatatgacgcatactccttccacgtgctgccgcgtatcgggcaggcggttgtgaatgatgcggacagctaccgctatcttgccgaatccatccgcatgcatccggatcaggaaaccctgaaaggcatgatggaaaatgccggatttgagcatgtttcctacaccaatatgaccggcggcattgtggcgctgcataaaggattcaaattctgatatggctgatacgtttgcagaaaatatcccgtctcctgtcagtccgcaggcactttaccctgtggttgccggatttctggaaacggtactcaaccggctgttgtacagtgaaaatgtactgaaaccggcccgcgcccgtctgaccggcaaaacactgaccctcaggctgacagagccggatatgcagttcacgctgatcttcagtgaaaaacagctggatgtgatttcccgctgggaagacccggcagactgtgtgctgcaaacccgttttctcacgctgctgaaactgaaagacaaacaacagctttcagctctgatccggcagggtgatgtcattattgacggcgatatgcaggtcattcagcacttttcagcactgctggatatggcggaatgggatccggcacattatctggcaccgtataccggcgatattgccgcacagacactgactcagattgccgtaaaaggcgggcagtttatccgtcgggcggtatgccgtcagcaggaatatctgaccggcgcgctcacccgtgagtgggcacttgctccttccgcgctggaagccgctcatttctgtgatgaagttgcggatgctgcacaaaccgcagatgaacttgagatgcgcctcgcccgtctggaaaaaaaagcaggaaccgggtatgagaccgagtgaaataaaacgcctctattttatcatccgcactctcctgaattacgggctggatgaactgatccctaaaaaccgtctgagctgggcaatccgtctctggcgccgttcactgttctggatgccgaacaagcataaagacaaagtgctgggtgagcgtctgcgtctggctcttcaggaactggggccggtgtggataaagttcggtcagatgctctccacccgccgggacttgttcccgccggccattgctgaccagctggcactgttgcaggatcgcgtttcatcatttgacggcaatctggcaaagaaaaccattgaagatgccctggaagggccggtggaaacctggtttgatgattttgatatcacaccgctggcatccgcctcgattgcccaggtgcacactgcagttctgaaagaaaacgggcaggcggtggtactgaaagtgatccgtccggatattttgccggtgatccaggctgatattcatctgatgtaccggctggcgaacatggttcctctgttaccggacggcagacgtctgcggccgaaagaggtcgtccgcgagtatgaaaaaacattgctggatgagctgaatctgcaacgcgaagcggctaatgccattcagctgcggcgtaattttgaaaacagcccgatgctctatgtgccggaggtttatccggatctctgccgtgaaaatgtgctgatcatggagcgtatctacggcattccggtttctgatattgcggctctgcatgagcagggcacaaacatgaaactgctggccgagcgtggcgtgcaggtcttcttcacgcaggttttccgtgacagtttcttccatgcggatatgcatcccggtaatatttttgtcagccgcgagcatccggacgatcctcagtatatcggtatcgactgcggtattgtcggttcactgaataaagaagataagcgctatctcgcggaaaactttattgccttcttcaaccgtgattaccgtaaagtggctgagctgcatgtggattccggctgggttccgccggataccaatgtggaagattttgaatttgctatccgtacggtgtgtgaaccgatttttgaaaaaccgctggcagaaatctctttcggtcatgtgttgctgaacctgttcaataccgcccggcgctttaatatggaagttcagccgcaactggttttattacagaaaaccctgctgtatgttgaggggctcggacgccagctttatccgcagctggatctgtggaaaaccgcgaaaccattccttgaatcgtggctgaaaagtcagattggcgtgaaagccgtgatccgtagtatcaaagaaaaagcaccgttctgggcggaaaaactaccggaattaccggaactggtgtatgacagtcttaaacagcagcgccgtcttcagtccggtgttgagcggctggcagagcagatgaaacagcagcaggctgctcagcggaaagcaaatttctcactgggtatcggtgcgacattgtttgtctgtgcgagcttattctatctggccggagcaccggttgcaccctgggttctgatgttttttggtatacttacctgggtaacaggatggtggcaatccggtaaaatgaagtaaagattgagttaaagcaaggtttcagcctatgtcgtgtatttccgtatacggctgtggttgtatataatgaagtaagtaggtccatatcaatttgaggtaaaactaatggccggtattaatatttggcaattgttaattattgctgtgattgttgtactcctgttcggaacaaacaaactccgtactctgggatctgatttaggtgcatctatcaaaggctttaaaaaagctatcggtgatgaagatcagaacaaagcagatacaacaacagccggaaaagacgcggattttgaacaaaaaaatatcgcagaaaagaaagctgattcagctgagcagccagagaataaaaacaaagagcaggtataacccgtgtttgacatcggttttggtgaactgatcttagtattggttatcggacttgtggttctgggacctgaacgccttccggttgctgtgaaaacagtagccggctggatccgtgtgatgcgttcaatggctgccaatgtgcagaatgaactgacgcaggaactcaaacttcaggaattgcaggataacctgaaaaagatggaagagcaggccggtaaagccatttcacctgaattgaaggcgtcgatggatgaactgaaagaagcagctgatacattacgccgctcttatcaggaaccggtggatacactgaaaaagcagttcgacccggaagcactggccgatcaggaacttgaaattccgtctgtccgtccggcatcagccggcactccggcgtcggaaaatccggctccggcagcaccatctccggccgttgctgaggaagcccctgtccggccatcaccggaagtcagtgatacagaacctgcaccgtcaccggtaaccgttgctgcgtcagattcacagaaacattaatagattacggtaaaagtacgttatggctgttgaagacacgcaaccgctgatcactcatttaatcgaattacgaaaacgcattctcaacagcctgattgcagtctttgttgtgtttgttgcgctggcgtatttctcaaatgatatctatcagctggtatcctcgccgctggtgagcaaactgccgcagggttcgaacatgatcgcaacggatgttgcatcaccgttcctggcgccgattaagctgaccattatggtctccatttttatttcggcaccgtacatcctgtatcaggtctgggcttttattgcaccggcgctgtataagcatgaacgccggttgttaatgccgctgctgtttttcagcaccgtgctgttttatatggggatggcattcgcgtactttgttgtcttcccgctggcgtttggtttctttacctcgacagcaccgcaggatgtggtcattgcgacagatattaataactatctcagctttgtcatggcgctgtttatggcgtttggtatctcctttgaggtgccgattgccattatcctgttgtgctggagtggtgcgacgactgttgcctcactgaagcagaagcggccgtatattctggtcggggcttttgtggtgggaatgctgctgacaccaccggatgtgttctcgcagacgctgctggctatcccgatgtatctgttgtttgaaatcggtgtgttctttgcccgtttctatgtaccgcgcagtaaagcacaaccgcaggatgaagaagccgaagagtaatgcgatactgcttcaggtaaaaaccgccttaataacagggcggttttttgtttccgggtgacggagatactcagagtttccggataaagctggtgttatccacttttttggtcagctctttactgatcagcgtcagcagcagcacggagcgggtgtcgccgtccggctcctgataaatcgcttccaggcctttaaacatcccttcagtgatttccacaatatctccgggctgcggaacattttgctctgacaggctgacacattcggcatttttcagctcttcaatcaatgatgcgggaacaacggcaggcagtggtccgaaacggacgaaatgattgacgccgcgcgttgagttaatcgtggttgtatgaatagtctcgggatcaaaagaaataaacaggtaattcgggaacaggggctcattgaccgtcacacgtttgccgcgaaccactttttcaatattcgccatcggtgtcaggcattccacctgctgccgctgcaaatgttccattgcccgcggaagttgtccgcgtttgcagtacaataaataccaatccttcattacgctatccaacacaaacgggggcttatataaagcctgataataacaaatttgttttactatgaatgcaacaaatggtgatttaagacaaatgagtgtgaattcagtcccttatttgagttgctttttaccgtagaatgatgtcatttaatgagttataaactaattatcatatttataatgacagaataataagggcaatgtcgatggacatttttttactcagtaacggcaaactttccggtaatccgcaatggctcagctatgcacaggagcgcatccgggcaatgataaaaacccgcgggatccgctctgcggtactgattgcatatgccgttatccgtgcagatcacgaccagcgtgcccgtgaactttccgaagcgctgggcattgatgttacctgcatcgaacattttgattccccggttcaggctgtcgaaaatgcggaatgcattcttgtcagcggcggaaatacctggctgctgaatcagttactgcatgagaatggcctggttgtgccaatccagcgcgcgattcgtgaacggaatattccgtatatcggctggagtgccgggtgtaacgttgctacgccgagcatccggaccaccaatgatatgccggtacgtaactgcgtggtgatgccgtctctggggctgttccctgttcagattaaccctcactatattgatgcggtcatcagcggccatatgggtgaaacccgtgatgagcggattgcggaattttgtgccatcaatccggatgagattgttgtggcgctgcgtgaaggcagcggcttccatatcaccggaaatgagctgcactacttcagcggcaaaaatgaaggattcaaactctttcagcacaacaaaacattcccggaacaatttgataccagcgccctggcagaccgggttccgttccgctgctgttgatccctgtacttgtaacagtgggcgggattcctataatggagtcccttccacctgctgacagattaataacataatgaaatatcgggacctgagagattttctcaccattctggaaagtcagggcgagcttaaacggatcaaaactgaagtcgatccttacctcgaaatgacggaaattgctgatcgcacactgcgtgcgggcggccctgcattgctgtttgaaaatccgaaaggttattcaatgccggtgctctgtaatctgttcggcacaaccaaacgggttgcgatgggaatggggcaggaagatgtcaaagcactgcatgatgtcggtaaactgctggctttcctgaaagaaccggatccgccgaaagggttccgtgatcttatcgataagctgccgaagtttaagcaggttctcaatatgccgaccaaacggctgagttccgcaccgtgtcagacgcatgttttcaccggcgatgacgtggatctgacaaaaatcccggttatgcattgctggccggatgatgcggcaccgctgattacctggggactgaccgtcacccgggggccgtttaaagatcgccagaatttaggtatttaccgccagcaggttctggggaaaaataaactgattatgcgctggttatcgcatcgcggcggcgcactcgattttcaggaatggtgtcaggcacacccgggggaacgtttccctgttgcggtggccttgggcgctgatcctgcgacaattctcggtgcggtgacgccggttccggataccttatccgaatacgcctttgcggggttactgcgcggtaataaatccgaagtggtgaaatgcatttctaatgacctggaagttcctgccggtgctgaaattatccttgaagggtatattgagccgggcgaaaccgcaccggaagggccgtacggggatcataccggttattataatgaagtggattatttccctgtcttcacggtcacacatattacccagcgtgatgaacctatctatcactcaacctataccggtcgtccgccggatgagccggcaactctgggtgtggcactgaatgaagtgctggtgccgattctgcagaaacagttccctgaaattgtcgatttttatctgccgccggaagggtgttcataccgcctggccgttgtcaccatgaaaaagcagtatgcgggacatgcaaagcgggtcatgatgggagtctggtcgtatttacggcaatttatgtacactaaatttgtcattgtctgcgatgatgatatcaatgcccgtgactggaatgatgtgatctgggcgatcaccacccggatggatccggcccgggacactgtcatgatggagaataccccgattgactatctcgattttgcatctccggtatcggggctggggtcgaagatgggactggatgcaacaaataaatggcccggcgaaacctcgcgcgagtggggcaaaccgattgttatgaccgatgaagtcagacaacgtgttgacgccatatgggacgaattaaatattctcgataattgagggagcacatggcaacgttaaactgcaaagttacctctgttgaatctataacggatacggtataccgcataaaattattaccggatggtgatttttcattcaaagccgggcaatatctgatggtggtgatggatgaacgggataagcgcccgttctcaatggcatccgcgccgtcatcccggcaggaaattgagctgcatatcggagcatccgaatttaatctttatgcgatggcggtgatggaccggatcctggataaccgccgggtgaccattgatatcccgcacggcaaagcctggttccgggaaaacagtgacgcaccgatgctcctgattgccggaggaaccggtttttcttacacccgttctgttctgctggcggcactggaagaaaattcgcagcgtgatatcacgttttactggggtgccagagagcatgtttatctctatgacctcggtgaattgcaggctctcgccgaaacacatccgaacctgaaaattatccctgttgttgaacagccggatgatacctggcgcgggcgcaccggtactgtgctcagtgcggtgctggatgattttggttcactggccggaaaagatatctatattgccggtcgttttgaaatggccaaaatcgcccgcgaacgtttctgccaggagcgtggtgcagatgccggccgcctgtttggtgatgcattcgagtttatttaaagaaaatcccgccccctgacggcgggagtatgctgataacaggtcagctaaacagttaaagcagtatcagcgacgtattgtgccgtgtgatgaagcagaaaacgtcgctgttatttataacgttctcagtgatcagctgcggacacgttcaatcacggttgctatcccctgaccgaaaccaatacacatcgttgccaggccgaactgcgcatcccgctgctccatgaccgtcagcagtgaattgataatccgggtgccggaacagccgagcggatgcccgagtgcaatcgcgccgccatgcagattcactttgtcatcataacagtcagataatcccatacctttcaggcaggcaagtgcctgtgccgcaaatgcttcgttcagttcgataacatcaatatctgccagcgtcagcccggcctttttcagaactgcctgtgttgcctgtaccggtccgtatcccatcagtgccggttcacagccggtaacactcatcgcccgaatcaccgcccgcggagataaaccatgctcacgggcatagtgctccccggacagcagagttacggatgcaccatctgagattgctgaggaattaccggcggtgactgtaccgctgaccggatcaaataccggactcaatgccgaaagttcagcaagactgccgttatcgcgtacggtttcatcccgggtggcaatgacaggtactccggcctggttatgaccctgaaccggatggatttcacggctgaatctgctatcacggaatgcctgtgcggcccgctgatgtgaacgcagagcaaattcatcctgtgactcacggctgacagaaaactgtcgtgccagtgcttcggctgtcagccccatcatgccggacgctttggccgtgtgcagtgcggcagccggattgatatcgataccctgtgtcatcgggatatgacccatatgttcaacacctcctgcaagtgccagtttaccgtcaccggtctgaatcaggcgggcggcatcatgcagggcctgcattgatgaaccgcacaggcggttcacagtgacggcaggcacggtgtgcgggatctctgtcagcagggcggcatgacgggctatgttaaacccctgttccccggtctgctgcacacacccccagataatgtcatcaatatcggctgcattgatattgttacgctttatcactgcactcatcacttctgctgagagtgtgtccgcacggacatgccggaatataccgttttttgagcggcccattgaggtgcggagaccatcaattatcatgactttttccatataaacctcactgtgcagtaacagggtgactatccggttgcggataataaggagtgttattaacagcatgtgcccgcagactgtccggaatggtataaagcggacccagtgtgctgtattgctctgctttttcacagaaagcgcgggtgctggtatcatccagataacggaaaatacctccccggaacggcggaaaaccaaggccgtagaccagagccaggtctgcttctgccgggctgctgataatgccttcctcgtagcagcggataacttcgttcaccatcggaatcatcaggcggtcgataatctcgtctgcagtaaagtcacggggcgtgcgtcccagtggtgcaagcacttcttcgagctgctcatcgggctgtttctgcaggtggcctttgccgtcatcaatatggcggtaaaacccgaggcggcttttttgccccagccgtttcagtccggcaaacagactgatgacattgtgctcttcaacgaccatccggcccggatagccctcagccatcacatgctgtacatgattagccgtatccagtccgacaacatcgagcaacagcgccggtcccatcggccagccgaattcctgttccatcacacggtcaaccgttttaatatccgctccgccggagaccagcagagaaaaggcgttcagatacggaaacagtacccggttgataaagaatcccggacaatctcccaccacaaccggtgtttttcccattttgtgggcgtagtgcaccacagcggcgattgtatcgtctgaggttttctctccccggatcacttcaaccagcggcattttaggtacgggattgaaaaaatgcattccgcagaaattgtgcgggcgtttcagcgcctgagccagttcactgacagggatcgaagaggtgtttgatgtcagaatgcagtgttcactaacctgttgttcaatatctgccagcactttttgtttgatgactttgttctcaacaaccgcttcaaccactatatcgcagtcactgagttcattatcatggcggacagggtggatagcggcgcgtattccggcggcctgaaccacggtcatttttcctgactgacactgtttttccagcaattttacggcttcatcaataccggcctgcaatgcggcgggctgaatatctttcaggtgtaccggaataccgctgtaagctgactggtaagcaataccgccacccataataccggcaccgataacagcggcctgttccggggcatcacgtaataccgtctgctggcgggtaaggcctttaacatattgttcattcaggaaaagtgagaccagagccccggcggtgagtgtccgggtcagtggtacaaaatgcgcggtttcgcagcgcaatgcttcatcgcgcgggagtttcgctccggcttcaattccgtttactgcagccatcggcgccgggtaatgttttcctgccttttgccggacaagggctttggccgtgataaggctcatctgtaattctgcagggtgcagctgtaacgccgcttttttctgctgccgttgtgcctgccagttagtccggccactgatcgcctgctccagcagcatcagtgaaccgttaatcaattcatcatcctgtacaatgccatcagtcagtccgagtttcagcgcttcaccggcagtcacaattttcccctgtgtgataagttcaagggcattatcacaaccaatcaggcggggcagacggactgagccgccgaagcccggcattatcccgagtttggtttccggcaggccgatacgcagatcgtcagtggcgaggcggtagtctgttgtcagtgcgcactcgcacccaccgccgagtgtgaatttccgcagtgcggcgacagtaggcacgggcagatcttcaatccggttaaacaaccggttggcgaaattcagccactcggtcaactgttccgccggtgcattaaacagagtcagaaattctgtaatatccgcgcccaggataaagctctctttggcggaggtaataatcaggcctttcagctgcggtgtttgttcaaggcaggcaacggcttcatccagtgaggcaattgtccgggtatccagtttgtttatcgctccctgcgcatcaaaaacaagttttgcaattccttctttttcccagctgaccttcattgattcactgtgataaagcatacggttctccttaaatattgcatcgctcccgtaaaggatgagaacaccatgtggtatgaccagatagagtaattgtgatttttttgttaacgaaagcaaataaaatgatgattttttgcgctgaagatcacgcaaaatgtctcaatatgcagaaacagaaaagaaaaacgtcgtgacgcgccgaagattcccggtaaataaccggggatgacatagcctgccatatccataatcgcggagatcatgctaagcttttgtcactatcataatgaaaaaaggtcaattcccatggaaaaaatggcatccctctaccgtgagcacatcgcaacattattacagcggacccgcgatattcttgcgcgtgagaaactggattcgttactgatccactccggtgaaccgatacgcatttttcttgatgatcgtgactatccttttaaaagtaacgtgcattttaaagcatgggtgccggtaactgatgtaccgtattgctggctgtggactgatggtgtgaataaaccgaaattatggttctattctccggttgattactggcacagtgtcgaggcgttaccttcttcttactggacaaatgaagttgaggtcatccatctgaagaatgccggtgatattgcctccatgctggcatcacaggataaaacccgcactgcgtatatcgggccgaacaccgatcgcgccgcagcgctggggatcagcagcaatcatattaacccgaaagcggtgctggatttctttgcgtttcatcgttcatataaaacagattatgaactggcctgcatgcgtgaagcacaaaaaatggcggttaacgggcatcttgccgcacatgaggcttttttatccggcctgagtgaatttgatatcaatatggcgtacctgatggcaaccggccatcgtgatactgatgtaccttatgacaatattgttgctattaatgaaaacgccgctgttctgcactacaccaaactgaataaaaacgcaccgcatacacggcacagcttcctgatcgatgccggtgcggaattcaatggttatgccgcagatttaacccggacatatgctgctgatgctgacagcgatttcgcacagctggtatcagatttgaatgatgagcagcagtcactgatcggtgatattaaagccggggtccgctataccgattaccatattcagatgcatcaccgcatcgcgaaactgctgaaaaaacataaaataatcaccggaatgtctgaggaagctatggtcagtgaaggggtaaccacaccgttcctgccgcatgggcttggccatccgctgggtcttcaggttcatgatgctgccgggtttatgcagaatgatcagggtgagcatctggcggcaccggcaatgtatccgttcctgcgctgcacccgtattctggagccgcgcatggtgctgaccatcgagccgggactgtattttattgagtctctgctggcaccatggcgtgaaggtaagttcagccagcactttgactggaaacgtattgagcagtttaaaccttgtggcggtatccgtattgaggataacattattatccatgacaacagtgtggaaaatatgacgcgggatctgaatctgccgtaatgaaatcgtaccttataccggctgagccggttatgtttactgaagagataaaaaaaagccgtttcatcaccctgttgcagcatacggacggggtggatgaagcaaagcaatttattcagtctgtcaaagatgaatatcccgatgcccggcaccattgctgggcatttgttgcggggcgtccggatgattctcagcaactgggattttctgatgacggtgagccgaccggaacagccggtaaaccgatgattgcaccgctgctcggcagcggaatcggggaaattacggcggtggttgtccgctatttcggcggaataaaattaggcaccggcgggctggtccgtgcatacggcagcggggttcagcaggcactgaaactgctggtaacgaaaactaaaatcccgcaggtgatctgtgaaataacctgtgattacagctttatcagccaggcagaattagtggtccggcaggtggatggtacgataatcaacagtgatttcggttcggatgtgacgttacgtatttcgattcctgctaccttactgagtgaggttagtgataaattacgtgacctgagccgggggatgtttgagcttaaatgccctgatgacaccaccggaaactgatttctgaggactctgctgcaatgcattttcgcgccataacccgtattgtcgggttacttgtcattattttttctgtcaccatgatcattcccgggattgtggcgcttatctataaagacggtgcaggtaaagcattcagtcagacattcctggcagcactgattatcggtctgctgctctggatcccgaaccgcaataaaaaaagtgagttaaaaccgaaagaaggttttctgattgtggtgctgttctggacggtgctgggcagtgtcggggcattaccttttattttttctgagcgcccgaacctgtcggtgacagatgcgttttttgaatcattctccgggctaaccacaacgggtgccaccacactggtcgggctggacacgctgcccaaagcgattttattctaccggcagatgttacagtggctgggcgggatggggatcatcgtattagccgttgctatcctgccgctgctgggtgtcgggggaatgcagctgtaccgggcggaaatgccggggccgctgaaagataataaaatgcgcccgaggattgcggaaacagcaaaaaccctctggctgatttatgtgttcctcaccatcgtctgtgcaattgccctctggtttgcggggatggatgtttttgatgcgatatcccacagcttttccactatcgccatcggtgggttttccactcatgatgccagtatcggttactttaacagtccggcaattaacaccatcattgccattttcctgctgatctcaggttgtaactatggcctgcactttgcggtactgaccgggcgtagcctgggagtttactggcgggatctggaattccggatgtttatttccctccagttcgtgctggtcgtgatctgtgcgttggttttgtggaagtttgatgtctatgctacggagggacaaaccctcaaccagtcgtttttccaggttgtctcgatggcgacaacggccgggttctccactgacagtttctataaatggccgctgttcctgccgatgctgctgctgtgtgccgcatttgtcggcggatgtgcggggtcaaccggcggtggtctgaaggttatccgcattatgctgctgttccttcagggggcgcgtgaactaaaacgccttgtgcatccgaatgcagtttacaccatcaagctgggccgccgggcattgccggaacgcattatcgaagctgtctggggattcttctccgcgtatgctctggtctttgtggtcagtatgctgttactgatagcgacaggtgttgatgagttttccgctttctctgcgatagccaccacactgaataacctgggaccggggttgggtacgctgggtgagaactttacaaccctgaatccgggcgggaaatggattcttgtcgtgacgatgttatttggtcgtctggaagtctttactttgctggtattgctgacgccgacgttctggcgtgattaacggagtgtttcatgtcgtacttgttgctttattccggccatgacgggcagacaaaaaaaatcattactgaaattgccctgcatttacgcaaagcaggggcagagtgcgatgtccgctctttgcaggataatcagccgctgaatctggcgccgtatgagaaggtgctggtcggggcatctatccgctacggtcactttaaccgggcgctggataaattcgcgaagttgcacgcggtgcagctgaatcagatgaaaaccgcattctttggtgtgaacctgactgcccgtaaaccggaaaaacggacaccagagacaaatgtgtatgtccggaaattcctggccgcgacaccctggaagccgacagcctgtactgtattcgccggggcattgctgtatccgcgttacggctggtttgaccggatgatgatccgtctgattatgaagatgacaaagggtgagacagataccaccaaagaagtggaatacacggattggcaacaggttgaggcatttgctgcagagtttgttcagatttaaagcaaatcaccggcattttgccggataaaacaccgttgtggtgaaaaaagtggcaaacagaaaaaaagttgaaataaatacttgcgtgatctcagcgagtgtctataatgcgccctcactgacacggaacaacacgctgagaagcgcgccgacagtagagaaaagcgaaaaaagttgagaaacaacgcttgactcgaaggggctgaaaacgtaatatacgcagcctcgcaacaacgcagaagaccggcaacggcagcgaaggttgcaactgctctttaacaatttatcagacaatctgtgtgggcactcgcaggacatatcacaaaaaatatatttttgagaagtcttgaagagtgaccaatacagcagcttagtaataagcagcagtaaacagtttaattctttgagcatcaaacacttttaattgaagagtttgatcatggctcagattgaacgctggcggcaggcctaacacatgcaagtcgggcggtaacagggggaagcttgcttctctgctgacgagcggcggacgggtgagtaatgtatggggatctgcctgatggcgggggataactactggaaacggtagctaataccgcataatgtcttcggaccaaagcgggggacctccgggcctcgcgccatcagatgaacccatatgggattagctagtaggtgaggtaacggcttacctaggcgacgatccctagctggtctgagaggatgatcagccacactgggactgagacacggcccagactcctacgggaggcagcagtggggaatattgcacaatgggcgcaagcctgatgcagccatgccgcgtgtatgaagaaggccttcgggttgtaaagtactttcagtcgggaggaaggtgtcaaggttaataaccttggcaattgacgttaccgacagaagaagcaccggctaactccgtgccagcagccgcggtaatacggagggtgcaagcgttaatcggaattactgggcgtaaagcgcacgcaggcggttgattgagtcagatgtgaaatccccgggcttaacccgggaattgcatctgatactggtcagctagagtcttgtagaggggggtagaattccatgtgtagcggtgaaatgcgtagagatgtggaggaataccggtggcgaaggcggccccctggacaaagactgacgctcaggtgcgaaagcgtggggagcaaacaggattagataccctggtagtccacgctgtaaacgatgtcgacttggaggttgtgcccttgaggcgtggcttccggagctaacgcgttaagtcgaccgcctggggagtacggccgcaaggttaaaactcaaatgaattgacgggggcccgcacaagcggtggagcatgtggtttaattcgatgcaacgcgaagaaccttacctactcttgacatccagagaacttagcagagatgctttggtgccttcgggaactctgagacaggtgctgcatggctgtcgtcagctcgtgttgtgaaatgttgggttaagtcccgcaacgagcgcaacccttatcctttgttgccagcgcgtgatggcgggaactcaaaggagactgccggtgataaaccggaggaaggtggggatgacgtcaagtcatcatggcccttacgagtagggctacacacgtgctacaatggcgtatacaaagggaagcgaccccgcgagggcaagcggaactcataaagtacgtcgtagtccggattggagtctgcaactcgactccatgaagtcggaatcgctagtaatcgtagatcagaatgctacggtgaatacgttcccgggccttgtacacaccgcccgtcacaccatgggagtgggttgcaaaagaagtaggtagcttaacctccgggagggcgcttaccactttgtgattcatgactggggtgaagtcgtaacaaggtaaccgtaggggaacctgcggttggatcacctccttacctagttggtattgaatgtgagtgttcacacagattgtctgatagaaagaagcagataccgggaataggcttgtagctcaggtggttagagcgcacccctgataagggtgaggtcggtggttcaagtccactcaggcctaccaaaaccgaattgatactgcgttatgaaaagactcgtttaccttagtaaacttcgcctttccatgccttgtctcaatgcggtttcctcttttcatgatgaaaagacacgcccgggaaaaccaaataatggggctatagctcagctgggagagcgcctgccttgcacgcaggaggtcagcggttcgatcccgcttagctccaccattatctgatatctgaaaaataattcagagtttaccggaaacggtatactgtgaattattatgctctttaacaatccggaacaagctgaaaaattgaaacaatcaatattatcaccgaggtaatattgatgagtctctcagccgaacaactttgaaagtactcactttcgaggggaagcgagctaaataatttcgcggaggccagcgcacagcaagcggagcatacatcagtatgtgagcattgcgagcactgcccgacaaagaaattatgacgcgcagcgacccgtccagaaagacactttcgggttgtgaggttaagcgaataagcgtacacggtggatgcctaggcagtcagaggcgatgaaggacgtgctaatctgcgataagcgccggtaaggtgatatgaaccgttataaccggcgatttccgaatggggaaacccagtgcaattcgttgcactatcattacctgaatacatagggtaatgaagcgaaccgggagaactgaaacatctaagtaccccgaggaaaagaaatcaaacgagattcccccagtagcggcgagcgaacggggagcagcccagaaccttaatcactatcagcatcaggagaacagtctggaaaggctggccgcagcaggtgatagccctgtatccgaaggtgttggtagtgtgagttcgatgagtaaggcgggacacgtgttatcctgtctgaatatggggggaccatcctccaaggctaaatactcctgactgaccgatagtgaaccagtaccgtgagggaaaggcgaaaagaaccccggcgaggggagtgaaaaagaacctgaaaccgtgtacgtacaagcagtgggagcacccttcggggtgtgactgcgtaccttttgtataatgggtcagcgacttatattctgtagcaaggttaaccgaataggggagccgcagggaaaccgagtcttaactgggcgaattagttgcagggtatagacccgaaacccggtgatctagccatgggcaggttgaaggttgggtaacactaactggaggaccgaaccgactaatgttgaaaaattagcggatgacttgtggctgggggtgaaaggccaatcaaaccgggagatagctggttctccccgaaagctatttaggtagcgcctcgtgaattcatctccgggggtagagcactgtttcggctagggggtcatcccgacttaccaacccgatgcaaactgcgaataccggagaatgttatcacgggagacacacggcgggtgctaacgttcgtcgtgaagagggaaacaacccagaccgccggctaaggtcccaaagtcataattaagtgggaaacgaagtgggaaggctcagacagccaggatgttggcttagaagcagccatcatttaaagaaagcgtaatagctcactggtcgagtcggcctgcgcggaagatgtaacggggctaaattatgcaccgaagccgcggcagcgatatgtaaatattgttgggtaggggagcgttctgtaagcctgtgaaggtggcctgtgagggttgctggaggtatcagaagtgcgaatgctgacataagtaacgataatgcgggtgaaaaacccgcacgccggaagaccaagggttcctgtccaacgttaatcggggcagggtgagtcgacccctaaggcgaggctgaaaagcgtagtcgatgggcaacgggttaatattcccgtactggtggtaactgcgaaggggggacggagaaagctaaatcatccgggcgacggttgtcccggtttaagcgtgcaggtggactgaccaggcaaatccggtcggttgttaacactgaggcgtgacgacgagccactacggtggtgaagtgattgatgctctgcttccgggaaaagcctctaagctccaggttaccattaatcgtaccccaaaccgacacaggtggtcaggtagagaatactcaggcgcttgagagaactcgggtgaaggaactaggcaaaatggtgccgtaacttcgggagaaggcacgctggcattaggtgaagtggtttacccacggagctgaagccagccgcagataccagctggctgcaactgtttattaaaaacacagcactgtgcaaacacgaaagtggacgtatacggtgtgacgcctgcccggtgccggaaggttaattgatgaggtcagccgcaaggcgaagcttctgatcgaagccccggtaaacggcggccgtaactataacggtcctaaggtagcgaaattccttgtcgggtaagttccgacctgcacgaatggcgtaatgatggccaggctgtctccacccgagactcagtgaaattgaactcgctgtgaagatgcagtgtacccgcggcaagacggaaagaccccgtgaacctttactatagcttgacactgaacattgagccttgatgtgtaggataggtgggaggcaacgaagtgtggacgccagtctgcacggagccatccttgaaataccaccctttaacgtttgatgttctaacccgggtccataatctggatcggggaccgtgtctggtgggtagtttgactggggcggtctcctcccaaagagtaacggaggagcacgaaggttggctaagcatggtcggacatcatgcggttagtgcaaaggcataagccagcttgactgcgagagtgacggctcgagcaggtacgaaagtaggtcttagtgatccggtggttctgaatggaanagtgcggaagagataaccgctgaaagcatctaagcgggaaacttgcctcgagatgagtcttccctgaccctttaagggtcctgaaggaacgtttgagactaagacgttgataggctgggtgtgtaagcgcagcgatgcgttgagctgaccagtactaatgaaccgggaggcttaacctgacaacaccgaaggtgttttgagttgagagacgattagagagatttttcagcacagtgaagaggcagaagtcattcactgtgaaagcttgttttggattgaaatgaatttgcctggcggccgtagcgcggtggtcccacctgaccccatgccgaactcagaagtgaaacgccgtagcgccgatggtagtgtggggtctccccatgtgagagtagggaaccgccaggttattattaagtgaagaagccaccctttgggtggcttttttgcgtttgggcgaaaagaaaaattattctgaatccacttctctccggatatccttttattaaaaaagtcaccacgtgccagataccagactccccgaacaattcccggtaaccgggaaattcagaacgcactatcttgtgggcaaactctgccgggagtcctgggttcatgcagcagctacaaataccggaaaagctggcctgataagccggatggctggcgggttatattacgccgtcagatacaggaacttcataatattagtcatcgaaagaagtttcagtattggatagcagactcatgaaagcgcccgggctgatgaactgtccgcagcctgctcatcgatatggtttcccggcgaacaggccgggcagaccagagtggtatttataaagacatctttgccatccctttatccctctgaatacaaaaaatcagataattaatcgccttcccggaatctgactgtgaccagaaaaataattccgtttgtattttatctgtcatcatgatgatattttcatcatcatcctgataatcaggttaataatggtagtctgcagataatatagatacttatcttagttgtttcaggaaaagacagagggtacggctacacaagagtaataaatattgccggggatgacatctgcaggataggctgtgtgaaatcagtgaaaaaaaacagcagataatgaattgaccgggatgctctgtggtggaaatgcattggccggtatttctgtgccggaatagcgttatctgctgttttttctgtgaattaattttcctgtaactgttttatccgccaatttgtcaggtcaatctggcaggctttcatgatatcgccggcaccactaccaccgagagttgcatcatagcgataccggcactcagcatcgcggaaagtgataaaggcggaatgtgacaaattcagtgactgaatggctttttcacttccggctgaatggagtgatgcaatttcctgtttttgctgtgccagaatcgtattcagccgggtatttgcggcattcagttttgcacccaggcagcctgcaatttttgtccgtggtgaatccccgacagactgatagcattgttccagcggacttaatcctttctcttccgccatcgttacagcgggaaagctgatgctcagaccgacgatacccagtattacagcagtgcgggataaattcatgcttattccttatttcaatcctgttcgttactgtccggctgacagatgaagattccggcagatgtatttctaatcctgcttatcataggtttcccctgtgccataagggtataaaataataccactttccgggtctttaatgtctgcgggtaaccgtccggcgggataattaagcgggcgggcgtttttaccggagaataacgtccgcaagccgctccggatattcgtttccagtgcattacgctgaccatttgtaatatcaaatccgataataccatagatagcaatattggcttttacattactcagactcgcaatatcgtatggatcccgtgaagatatcacgactaagggaatgcctgcatcattagcggagttgatgataaattgtgcatttgtatcacgttcccgcaggttgtaagtgaccagtaaaataatatcctgcccgctgatcatggtgctgattttcttttcagagagcgttttcttatctgtttttattttttgtgcagtgacatgaatacgggtttccgtttcccgtgcaatatcattcagatgctttttaattaactgattacggggatattcatcggagattaccagaattttattttccggtttcagttggtaaggcaggataccgtcatttgttattatggtaacggcctgttcagataccttattttcctgatttttatgctgtactgaggcgacaatttgctgtgctttcaccggatccgcaggtgctccgctgatggctttattcagcttcatcagaaccacccgttttgcggattcatcaatacgttgctgcagttccgggtttttctgtgcctgttcatccagatagcgatataaattatcaaggcgcttaactgcttcttcatcccacatttttaccggcatcaggataatatcggcgcctgcagacagggcgtgctcaacggcaaaattgagatcaaagttatcagtgatggctttcatatccatggcatccgtaattatcagcccctgaaaatgaagttctttgcgtaatatgccggtcaggataggttttgataatgtggctggtgtacctgcttctgaaccgtcacgggtttttatttttgtgtcatccagtgccggaacaataatatgtgcagtcataaccgcatctgcaccatgttgcagcgcataaataaatggcggtaattctgtttgccgccaggttttttcatctgatgtgacaaccggaagggcgacatgtgaatctgcagagacattgccgtgtccggggaaatgtttcagagcagtgataagtccgtattgatgaataccacggatataggcggctgacaggatttctgtcagctcttttctgtcagaatacgcccgtacaccaataaccgggttattttgattattattgatatccacaaccgggccaaaattcatattaaatcccagtgcagataactcactgccatgaatttcaccggttagtcttgctgaatccgggtcacgtgtagctccgagagccatatttccgggcatttctgtaccaacccgcagccgggttatataaccaccttcctgatcagtgctgataaataacggaagacggtaacgggaagactgaatatcattgatcagttttactgtctggggggtgttaattaaattttccctgaataatacaatgccacctaaccggtaacgatagataatatctttgatatcgttatttatattgatcacgggaacaggaaccggactccggaatatatcccaatagcgaaaatcaagcatcatcagctgaccaattttttctgtctgactcatggatgcaacaatgttttctgctgccctttccggttcttttttcagtgcatcgatatctgaaggagtcagtggtgctgcgataatttgaaaactgaataatataaataacagcaatacctttttcataatgacatccttttcatgatgttttcagctgtttattgtggccggttatttttattttctgagctatcagattgctgatagttcttttcatcctgatagctccatccggcgaatttttactctgatttctgtttgtcagcaggatataacggtcagataaggaaatcaaaaaatgatgcaaaaaacagcactgcaaatgtcatctgcggcgtacttttagtgaattcaatgacagcgtcagcggcgataacctattagcatgaaaagaatgttactgacctgactgtgactgataaccgggccggtattaagccgggcgcaggtgatgacgggaagcaaattcccggtcagggcgggatgttgttgatcctgatgaaactgttgagtgaattgaaattaataaaggtaatgctgaatttaaactaacaggaaatagaggtatgactggtttggggattaaatattagtttttaaattttgtttttatcaggtaaaaagccatgccgtttcaccggtatggctatttttaatattattattaatgtgtggctgtctctttccggggcaatgcggaagccggaactccgaatagtttgtcaaacgcccagttaaagaaaaatgtgtagatcgggataaaaataatcagggcaaaatccagcaggaaagcctgtattaaactgaccgataaccaccatgcaatcagcggaataaggaaaaccaccagtgtcagctgaaacagaacggcgtgtacgaatctgcggcggaatgtccggatacgggaaatctggcgggattcccagaattcaaacaatgtattaaagataaaattccagctgacggcgatggtggtaattgccagcgcaagcggcccggttacaccggctgaattaccggagagtatggccagcgcaactgatgaaatgacccagccgatgagctcgtaagcggtgataaagaccagttttcgttttaaaccctgcatattgatatcctgctgctgtttactgtgaagaatgcagggaaagtaaatcaatagagatgataataaaagtcagctactatcagattttctgacaggccggagggtatatgccgtttaacagtgataacttgcagctttttctgacggtgctggagaaaggatcattttcagccgccgcaagagcgctgtaccgcgtgccgtcagcggtcagtatggcggtcagtaatctggaagctgaactgggttttgcactgtttgaacgttcaggcagggcaccggtaccgacagaaagagccctggcgctggcaccgtatgccagagagataacggataaaattcatcagctgaatgtgtttacccgtgaactgacgcaggacgtggagagcacactggcggtgggggttgcaacctgtgtgaatccgcaggatctgttttctgcactgcagatactgaatcagcgttatccgctgctgaaaacggaaattttatccgggtcacaggatgacattctgccattgctgcatcaggggcggatccagctggcactggttttcggcgggctgtatgtggatccgcgcgagcagtttcactgtatcggtcatgaagccctggtggccaccatttcagccacgcatccttctttatcacaacaacaatctgtttatattgaggatttggtacaggcaaaacaaatcgttattgccagtcttcaccattctctcactgatgtgcgttcacagatggcgacgaaaacctggcagactgataatttttcggtggcactgggactggttaaagcgggtatcggctgggggaatctgccggaatccatgatccgggcggaagtggcgtccggaacactgaaagtcctgtcattccgcaatacccgcaacggtctggttctgccggtgcatattgtcagccggaaaggggatgtgcttaaacgtggtgctcaggagtgcatcgggctgctgacggaaagccgtgtgtctgcgggaaattagttgttatgataacgggataaatcagcagagaggaaaagcgtatgtttgaaatccgcgatttacaggttatccagggcggaaaaacattgtgggacggcctttctttccggctgaatgccggtgagcgtctggggatctccgcacccagcgggttcgggaaaacaacgctggggcgggtcctggcacagtggcagcaaccgcatgccggggaactgctgctcgacggcaaaccgctaccgaaagccggctattgtccggtacagctggtaccgcagcatcctgagaagtgttttaatccgtaccgtacgaccggtgccgggttatatgatgcctggaaaccggatgcggaatggctggaaaagctcagcattgagcctcactggctggaacgtcgtccggatgagttgtccggcggggaactggcgagaatcgcactgctgcgggcgttagatccgcgtacccgtttcctgatcgccgatgaggtgacggcgcagctggatgcacatattcaggcacagatctggcaggtgctgattgaagaatcagagaaacggccgctcgggctggtggtattcagtcacaataaggcgctgctggaaaaggtctgcacatcggtatggattgccggagagccggaagagagcctgctgtctgatgtggcagtttgacttttccgtccggtggcataaaaatacgaagctgataaataataatgataattattactgattttgaaggatcagcgacgtgaaaaaaactctgctttgctgcgcggcattttctgcattttccgcgcaagcctcttcttcctgtcagtcactttccgttccggatgaaaaacagacgatgacgattaccggcacatttgatcacaacggacaggcctgtgtgcagttgccgttgtcagaaaaacaggtagtgattgcggaaagtgagaatatccgtgatttgtcactctatgacagtcagatgacaccccgccggacgctgcttaccgacaatcctgtcacagaaatgcaatctgtgacattcacattaccgtttgatgacacctggacactgacctcacaggggataccgggctctgaatggaagttggcgcttactaactatccgtatcagccggtagctgaaaacatctccctgccggtggacagtgtgcgcctgcaacagctgataacgctggttaacgggggcgatacctcggctttctggcaggcggtgacagaaaccccgttggttgaggagtatgacgagcaccacaagcggatcacatttctctggcgtggtgcgaaagtgaatgcttacatacttggtgcgccttccggacagcatgatccgatggccagactgaatgataccgatatctggtatcgctcctacattgttcccgcagagactgtcagtcagtataaaattgccccggatattccgcagcttgacagttccgttgaaggtgcccgccgtaaagcgctgctgagcacggcacaggcggatccgcgtaacccgctgagtgcgggtgccgacggggcagatgaatttaatcgccatgccattattgcgttagataacaacagagtgtgtgatttccgggcgcccggacaacaaccggtttttggtacggtgacgctgcatcagctgcacagcgatatcctgaataatcagcgggaaattgcggtgtataccccgccggagccgggtgcggagccctggttgctggtgctgtttgacgggcagatataccgcaaaaactatcatatcgtcacatttattgatcagtgggtgaagcgcggggaaattccgccgctgtatgtggtgatggtggacagtatcagcagtgagcagcgcggcaaagagttgccgccgaatgagcaattcccgcagtttctggacaaagagttgatgccgtggctggcacagcagggtattaatatcccggcggggcggaccattgtttccggcagcagttacggtggccttgcgtcttcctggaatgcgatgaaattacctcaccgtttcggcaatgtgctgagtatgtccggttcttactggtggtcaccggagggagagccgccggaatggctgattcgcgagtttgcaggtactcacaaacttccgctgcggttttttcttgaggccggtgtgtttgaaacccgtgccggtgccggcgggattttgcataacaactgggcgctgtatcaggttttacaggaaaaaggttacgaggttacccgtgaggagcgcccgggtgggcatgactatgtctcatggtgcgaaaccctgcattccgggctgatgcatctgactgacacaaagaggtcacaatagtgtcacgctgatgtcataagagcggattaggctgtcctgcgttgataactgactattttattaatgacaaggattctgctcatgcttcatgcgacgatgaaaacacgggttgcagctgccgttctggcactgctgacaggctctgcattaccggcagttgcagcggggaatgcagatgccattctggcacaggatcgcgccgccaaaggcaatatcacggagttcggcggtgcgcgacgtctgtcatccgatcagactgaggcgctgaaagcggctatcggtcagaccaaagcaaaaaatgtgattctgtttatcggcgacggtatgggggattccgaaattaccgtggcgcgtaactatgcagaaggcgcgggtggcgtgtttaaaggaattgattccctgccgctgaccggccagtacaccacgtatgcgctcgataagaaaacacagaaaccgaattatgttactgattctgctgcctctgcgactgcctgggcttccggggtgaaaacctataacggtgcgctgggcatcgatgttaccggcaaaccgcacaccaccattctcgagctggcaaagaaaaacggcaaagcgaccgggaatgtcaccacatctgaaattcaggatgccacacccgctgcactgatctcacatatcagccagcgtaaatgctacggcccggaagaaaccgcagagcgctgcagtgcagatgcgctggaaaacggcggattgggctccatcagtgaacaactgctgaatgcccgtgcggatgtcacgctcggcggcggtgcgaagagtttccgccagacagccaaagccggggactatgcaggtaaaaccctggaagagcaggcagcggcacgcggttatctggttgtgaaagatgccaaatcgctggcggatgtgaaagcggcaaatcaggataaaccggtgctcggattattcagtgacggcaatatggaagtggcgtgggaaggtccgaaagcctcctaccgcggcaacctcgacaaacctgtcgtggagtgtaagccaagttcaaaactggatccgaatgctccgacactggctcagatgactgaaaaagccattgatctgcttaaagatcatgaaaacggcttcttcttacaggtggaaagcgcctctatcgataaacaggatcacgcggcaaacgcctgcggccagatcggcgaaaccgttgcactggatgaagcggtacaaatcggtatggaatacgcgaaaaaacatggtgatacgctggtgattgtgaccgctgatcatgctcattccagccagattattgaagcggatgtagtctcaccgggtctgactcaggcactgctgaccaaagacggcagcgtgatggcagttaactacggtaactcggaatcagattcgcaggagcataccggtgcccagctgcgtgtggcggcatacggtccgggggcggcgaatgtggtgggtctgacggatcagacagatttgttcttcaccatgcgggacgcgatggagctgaagtaatctgcggtacctgatattcacactgttctgaagtgcttttcttcatgttgattgcatcattttgctgatttcagcagtggctgccgccggtactctgtgccggcggttttttattattttttgtaacatgatgatttttgaaatatatttaccataaggtatacttatccgatgtcccggctccggggcagacatcctgtattccgtaagactgtgtgttttatgcgattttttattctgatggcggcggtgtttattaccattatcacattgtgacacagtgcctgtgtgatataccgttgatctgatcgttttaacgggaccttatgctgacgaaaacactatgctgacattactccatcttctttcatcggttgcgctgctggtctgggggacacacattgtccggacaggaattatgcgtgttttcggtgcggatctgcggcgactgctcggaaagagcatccggaaaacatcacgggcgtttctcgccggtctgggggtgactgcgctggtgcagagcagtaatgccaccgcattgctggtgatttcgtttgtggcacagggcatgatagcgctgccgcccgccctggtgattatgctgggggcggatgtcgggacggcgctgatggcacgggtgctgacgtttgatctctcctggctctcacctctgctgatcctggcgggggttactacgtttctcagtcagaaaaagagccggaccgggcaactggggagggtcggtatcgggctgggtctgattatcctggcgcttcagctgattgtggcttccgcagaaccgatcacacaggcgtccgctgttcaggctattttcacctcactgagcggggatgcggtgctggcgctactggtgggcgcactgttcgccatggtcagctactccagcctggcggcggtgctgctgacggccacactgagtgccaccggcctggtgccgctgcatatcagtctggcgatcgtcatcggctctaacctcggcagcggcttcctggccatgctgagcagccgcggtcagaatgcggttgcgcgtcaggtggtgctcggcagtatgctgttcaaactgattggctgtgtgctggtgctgccgtgggtgaaaccgctggcgctctgggtcggccagtacaatctgccggcggcggaagtcgttatttatttccatgtggtctataacctggtccgctgtgtgctgatgctggcactggtgaagccgatggcacggctgtgtcagcgtcttatcgccgaaccggaggcggaagaggacagcgcagcgccccgttatctggatcagagcgcgctggatactccttctcttgcgctggctaatgcggtacgggaaaccctgcggctgggggatgtgattgagcagatgcttcagcgttttgacagtcagctggcgggtaaaggtgagcagaaacggctgatcagccacctggaagaagaagcagagatgctgcacagcagtatcaaactctatctggcgcagttacagcaaaccgaactgggggaaagtgattcccggcgctgggcggaggtgattgataccgcgatgtcacttcagcagtcctccctgattatcgggcggatgtcccacgatgtggcgaatcagacggcggatccgcagcgtgttttctcgaaagacggctacagtgaactgaccaccatgatgtcacggctgcagaataacctgaatctggcgatgtcggtatttgtttccggggatgtggataatgcacggcggctgcgccgggcaaaacaccggttccgtctgctgaatcagcgttactcttttgctcatgtggagcggctgcatgtcaataatctgcagagcatcggcagcagccggttacatatcgggctgctgggggatatgaagcgtctgaactcgctgttttgctctgtggcctatcatgtgttagaaggtgtcgcagatataaaaacagagacaacaaatgatgacacttctcacgagacagcttgaacggcaggaaataccgtgcatttttatcagcatctgggatgtgaactgatcgcaaagccggatccggcgctgtttgccctggaaccggaagacattcattttgtgtctcttttccggaactgatcatttaacacattaatatctgttcaatttatagacgcattaattataggtgtatgattttcaggtatataatcatgcgccttttttgcattttatgcgaaaaagcggttgcaacaggcggcagattatttatgataacagtaatgattctcatttcgttattgtaaggagtggctgtgatgcaaatcaaacacccgctttcatcgtttttctggcagcagttaaccggggtcggtggcatgatgctggcgctgataccggtcgtgttgtttttatcacaggggcatgaacaggatgctgcccgtattgcattagcagtggtgattctgctgacaatgccgatgctgtataaccgcgtattgcgtcatttcctgctgattccggcagggattgcattcgttttgggaagtctgctctggttcgagcatctgaggatgtgatatccgggaagtgatgtcagaagattgtcataacagtggtgcgaagggggggacttgaacccccacgtccgtaagaacactaacacctgaagctagcgcgtctaccaattccgccaccctcgcaggtactgtcattcaatctgctgtcagttgtgtgtgataagatctgattggtgcgaagggggggacttgaacccccacgtccgtaaggacactaacacctgaagctagcgcgtctaccaattccgccaccctcgcaattcagaactatcttgtaactgatagcatggaggcggattttagcggttttatccgcgccgtcaatatttttttatcaaaattggtgacttcgcttacttattaggcatttgtagccaggtagaccttaaatttaccggtttgcgccagaaccttatgctgaccaaatgtgctgtccagcagatcgggatacggtaaaaaggcgttggccacgatgcacagttttccgccgcggttcagacgggctttggcaccggaaataaggcgctgtgcggcactgtagctggtgttcagaccgtcatggaacggcgggttggcaacaatccagtcatagcggtcactgatatccgaatacacatcactggcgattacacggccttccagctggttgcgtgccagagtttctcgtccggcttcaagggcggccgctgagacatcactgagcgtcagggtcagccccgggttacgttttgccagtacggtcgcgataacaccactgccgcaggcaatatccagcagagagccggtcaccgcctggttcagtgattccagcagcagtgcgctgccgacatcaatattgtcctggctgaatacacccggcagcgtcacgatttgcgtcccttcagcggtataactgccgatccactctttcagggcaaagtgtgccggcgtggtcagttcgccgtaataaaggccgcagcggcgtgcgctgtcaattttacggagtgctgtgaatggctctgtcattttttccgcgctgcggacaccactgcggttttcaccgacaataaaaatattactgccgaccggcaggcaggaaaaaatctgtgtcagctggaacagcgcttcctgtttactcttcggccagaaatagatcagtgtgtcgcattgtgcggcggcttccgggctgacggtcagcgcaaatgcggcgcgatcacccagcgggacacgcagggcctgccactgatgatactggctggtgctgacatacactgactgcgcggaaagctgtgcagcgaggggatcctgaatgtccccggcaagcaggacacggctcccggtaaattcgtctgcatgacgtaaaatcacttcactggccggggtaagcatggacatccgttaactcctgtaaatcataattcggcagcattggcgcgggcagcgcgctttgctaagatagtgtcgtttgttatttcagggatacattatgacgcgacgagacagaatgctggctcagatggggatcacccaatggacgctgcgtcagccgcagcgcctgaaaggggaactgtctgtacagatcccggcttcggcacgtctgctgatcataaccgatgagcaggcagatctcacctgcgatttactcagcgatatattccgcagcctgaatatcacggcggatgatgtttactgcatcacaccggataatgtacagagtatcccggcgcagacaaactgcctgtgctggctgccgggaacggaagctgaactgccggattcactgccttcattacgctctccccgtcttgccgacctgtatcaggacgcgcaggcaaaacgcggattatggacacaaatttatcattatgatcagactgtcaccgctgcttcccgctgatttttccgccgcattccgtattgaacaggccgctcacgcttatccctggagtgaagccacattccgcagcaatcacggcgaacgttaccataacctgaaactggaagcagacggggaactggccggattcgccatcaaccagacggtactggatgaagcgaccctgtttaatattgcggtttcacctgagcatcagggaaaaggttatggccgtcagttactggaaaaagtgattgaagacctgacagcaaaagggattgcgacactctggctggaagtccgggcatcaaacagcccggcgattgcgctgtatgaatcgcttggttttaatgaggtcactgtgcggaagaactattatccggcggcacagggtaaagaggatgcagtgattatggcgctttacctgagtttcggaatgtcatagcgcgaaatgtaatagagcgataagtcagataaaacggcggttttttatccctttcggcaattttctgcgtgttactgtgatggtatacatttatcacaggcgcgccttgtcatgtttatccataaaattatcacaccgatgtttatccggcgctttgaatgcgtcggttctgaatgcctgtcgcactgctgccaggactggtttatcagtattgataagaaaacctataaaaaatatcacagtgcggacagtattgaaattaaacagatttctcaggaacatgttcttaaatcggagcgtgccggtacatatgcgtatatccggctgacagaagaaaaacagtgtccgtttctgacagaaaagcggctgtgtggtgtttacagcaagctcgggccttcggcaatgagtgatacctgccgtgaatatccgcgcagtgaaataaaatatcagaatgcgacgttcaaacgtttgtcactttcctgcccggaggttgttcgtcagttgctgttttccgccgatgccatgcagttaacggaagaagagcagtatctgaaaaaagtaccgcaggatgcggcgctgactgatccgcaatacctgatgtacctctggtgtctgaatctggtgcaggtaccgtcaccggagtttgaggataacctctatgccgttatgcagctgctgacgtttatcagtaagctcaattatgacattgaagcgaattttgatcgtattcagggcgtgtatgaatttctgctcaatgcaacagaaaacggagaactgacggcagagcgcagagcactgccgcacccggtcagttttcagaccgcagtattaagtgtttacggtaaatttattcccaggttatcccgcagtggtacttttttattctccacttatatcaatacgctgaagcaactcggaatggatgagcaacagaccgcagtacgcacggaagaaaacatggcgcgtctgcggtcagaatggaaagtacagcagcagaacagttgtctgaatcaaccatacacactgcgtaatctgttttcctatctgctgtatcacagccagtttccgcatgcggctaatttcgccggtggtgttaccggttcccgcaatgccttgtctcacttcagtctgctggtcatggattatttctatttgcggaccaatctgacggcgctggcggtaacggaagaacgggtactgaaagagagtgatgttcagcttttgctgggcgcctatttctcactgaaaatgcatgtgggtgatattaatgcagatttactggcactgatggaacgttgtcagatgagcgatgcaatcgcctgtatctgcctgctggataactgacggagccggattttcaagcttttgttgtttcacggggcaaaccgggcgaaaataagcaccattaatgagaaatcagaggcggaaaccgtgtgtttctgcctcgcagccccagaagaacgcccagatgtcaaataatgcatttttacaggaagtggccaaacgccgcacctttgcgatcatttcgcaccccgatgccggtaaaaccaccattaccgaaaaagtcctgctgttcggacaggctatccagaaagccggtaccgtcaaaggccgcggctctaatcagcacgccaaatctgactggatggagatggaaaaacagcgcgggatctcaatcaccacatccgtgatgcaattcccgtatcacgatgccctggtgaacctgctggacaccccgggacacgaagacttctccgaagatacctaccgcaccctgacggcggtggactgctgcctgatggtgatcgatgcggcaaaaggggttgaggatcgtacccgtaagctgatggaagttacccgtctgcgtgacacgccgatcctgacctttatgaacaaacttgaccgcgatatccgtgacccgatggagttactggatgaagtagaaaacgagctgaagattgcctgttcgccaatcacctggcctatcggctgcggtaagctgttcaaaggggtttatcacctgtaccgcgatgaaacttatctgtatcagaccggccaggggcataccattcaggaagtccgtaccgtaaaagggctgaataacccggatctggatgcagctgtcggcgaagagctggcaaaacagctgcgtgatgagctggaactggtgcagggcgcatcccatgagtttgatgaggaactgttcctcgctggtgaactgacaccggtcttcttcggtaccgcgctggggaacttcggggtggatcatatgctggacggcctggtttcctgggcaccggcaccgatgccgcgtcagacggatgtccgtgaagtgactgcaaaagaagataaattcaccgggtttgtctttaaaattcaggcgaatatggatcctaaacatcgtgaccgcgtggcgttcctgcgcattgtctccggtgtgtatgaaaaaggcatgaaactgcatcaggtgcgtctcaaaaaagacgtggtgatttctgatgcgctgacctttatggccggcgaccgtgcgcatgtggattgcgcctatcccggtgatattatcggtctgcataaccacggcaccattcagattggtgataccttcactcagggtgagattctgaaattcaccggtatcccgaactttgcaccggaactgttccgccgtatccgtctgcgtgatccgctgaaacagaaacaattgctgaaaggactggttcagctgtccgaagagggcgcggtgcaggtcttccgtccgctggccaacaacgacctgattgtcggggcggtgggtgtgcttcagtttgatgtggtggttgcccgtctgaaaagcgagtacaacgtcgaagctatttatgaggcggttaacgtctccaccgcccgctgggtggagtgtgacgatgtgaagaaactggaagagttcaaacgtaaaaacgaactgcatctggcacttgacggcggcgataacctctcttatatcgcaccgactatggtgaacctgaacctcaccgcagaacgttatccggatgtgagtttccacaaaacccgcgaacactgacagaatgagaacgcgcctccggcgcgttttttttatggcggagttaagatacactgacagacagatgatgttcatcatgaaaatgaagaaggatacgataatgcgcaataccatgaaatcactggccgtcctgctggtcagcggcgcgctgttcagcgcatccgccatggcgggggaatctctgagtcagaaagccggccaggcgtgggacagtgcttctcagtctgcggaagatttgggtaagcaggcggagcaaaaatttgacggcgcggtaaaagatgcctcactgctggtggatgacagcacgatcaccgccaaaatccgtggtcagctgctgagtgcggatgatattgacagcaatgatatcgccgtgaaaaccattaacggtactgtgtatctctccggatttgttaccacagatgcgcagcgtacaaaaatcatcgatattgccaaaggcgttcccggtgtccgtgccgtggaagtcagtatcgggcagtataaataaccggcaggtaatctgcgccgggggaagagcaggatgggaacgtatatcccggtaacgcccgggaaaatcgcaccgctggcctggttgcctgatccgcttcaggcgaccggtaaactggcgctggtctgtgaaggcggcggccagcgcgggatttttacggccggtgtgctggatgagtttctcaaagctgggtttaacccgtttgatttgctgataggcacctctgccggtgcgcagaacctgtctgcgtatctgtgcggtcagcgcggctacgcccgtcatgtcattacccgctacaccaccgacaaacaattctttaatccgctgcgttttatccgcggcggcaatcttatcgatctcgactggcttatttcttcaacctctgcggaatgtccgctgaatattgcgcatgcactgcggcgctttgatcaggggcaggagttttatatgtgtgccagcagggcggataatctggatgccgcgtatttcagcccgcaggccgaagactggctggaatatatcaaagcctccagcgctatccccggattctaccgtgaaggggtggaaattgacggcatcacgtatcacgacggcggcatcagtgatgcggtgccggttattgaggcatggcggcggggcgcgacccggattgtggtgatccggactgtgccgtcacagctctattacaccccggaatgggtgaaaaggatggaacgctggctggaaaaaagccatctgaaacggatggttgccatgatgaaacagcatgccaaaagctattaccggacacaaaaatttattcagtcaccgccgcccggggttgaaattgctgaaatttatccgaatgcaccgctggcaagcaatgcgctcggcagccgggttaaaacgctgatgcaggattaccggctgggccgccgcagcggacgttattttctggcaacactcggtgagcgctgggcgtcatatgagccggtacgaagttccgtactgagggttccgcccgcatccaacgacaacgactcacaactgccggtcacggacggtacagcggcggtattacattcaccggaacgctcaccggaaaagccggcggactgaataaatgcaatttattgatacccactgccatttcgatttcccgttttttacggatgatcttacccgccataaagccgcagcggcacaggccgggctgaccgatattattatcccggcggtcagcaatcggaacctcagcacggtggccgggctgtgccggtcatccggcgatgcatttccccgcctgcacgcggcatttggtctgcatccgctttatattgccgaacacacccctgaacatctggaacagcttgagtcgtttatcaccgcaagcgggacagaatgcgtggcggtgggggaaatcgggttggatcgctatatggcggagccgcagtgggataagcagctggatttttttattgctcaactgaaactggccgcacggacagataaaccggttattctgcactcccgcaaaacccatgacacgctcgctgctgttctgcgccgtcacccggtgccccgccgtggtgtgattcacggattttcaggaagttttgcccaggcggatgcctttgtgaagctgggttattacatcggggtcggcgggacgattacttacgaccgggctcagaagacccggcgggcaatcgcgcagctcccgctctctgcgttactgctggaaacggatgccccggatatgccgctcagcggttttcagggtgaaccgaaccggccggagcggattgtccgtacatttgaagtgctctgttcactgcgcagtgagtctccggaagagattgctgctcagatttatcgcaacagctgtacacttttttcgctgcaatcatctgattaagattcctgaatcgattttcccgcgattttgtcctgttaaagcctgcattttgtgtgccaaatcacctgaaatcacttacaattgtaagcagatgttatttcatgttcgtcatctggttaaatacccgccaattcccggctttgcgggagacttttcagggtaaaatagttgaataatgtgattatcatcatatttttgtattttttgttacttttttcagtcgttatttgtgacgcaagttgattgttggccggactgaccgggtataatcagcgccacagggtcctgctcagagctgcatgcggagcaggactattaatctacattatcgtgaacagggatacttccatgcaactccttatgagtctggtcgggatggcagcgctgatctttatcgcagtgctgttttcaagtgatcgccgggcaatcaaactgcggactgttgtcggtgccttcattattcaggtactgatcggtgcgctggttctctatgtcccggtgggacgtaaaatcctcctggcaatgtctgacggtgtcgccagtgttatcggctatggccagaaagggatggactttattttcggcggcctggtatccgacaaaatgttcgaggtattcggcggtggcggtttcgtctttgccctgcgtgttctgccggttatcgttttcttctcctcgctgattgccgttctgtattacctcggcattatgcagcttgtgattaaaatcctcggcggcggtttacagaagctgctgggcacctcccgtaccgaatccctgtccgcgacagccaacatctttgtcggacaaactgaagccccgctggtggtgcgtccgtatatctccgggatgaccaactctgaactgtttgcggtgatgtgtggtggtctggcatccgtggccggttcagttctcgccgggtatgcgcagatgggggtaccgctggagtacctgatcgcggcatcctttatggcggcaccgggtggcctgctgtttgcgaaactgatggtgcctgaaaccgaacactttgatgaccgtaccgaagcaatggccggtatggcggaagaagagcgccctgccaacatcattgatgcggcggcaagcggtgcatcttccggtatgcagctggcactgaacgtgggtgcgatgctgctggcgtttatcgcgctgatcgccttaatcaacggtatcctgggcggcgtcggtggctggtttgactatccgcagctgtcactggaactgatcctcggctgggtcttctcgccaatcgccttcctgattggtgtgccgtggagtgaagctatgaccgccggttcgttcatcggacaaaaaattgtggtcaacgaattcgttgccttcatgaacttcggtgaatacatgaagccggatgcacaggtgattgctgccggtttacaaccgttgtctgatcacaccaaagcgattatctcctttgcactgtgcggttttgccaacctctcttctgttgctatcctgctgggtggcctgggcggtatggcacctaaccgccgtaaagacgtggcacgtctgggtatgaaagctgtgatggccggtactctctccaacctgatgagtgcaaccatcgccggtttcttcctggcactgtaatgctcttcctgcacaggtgaacccggttcacctgtgcatttcactgattcagtgtacttgtctttctgtctctccctgtttatccctttcctgcgctatactatgccgtgaatatgtgctgtcattttgcgcatatcaggccattagcgtgatttttatcacataattatatgtattgatgtaaatgctgttatataaacgtgatgaaaggcacgtattatagcgccaggacatgctcaaatacggcatggataccatgtaacggattcggtgattctgtttatcagtcacctgtattacagcgcggtgagaaggatctcagcgttagctcttatctcaagagagacaacgtcttcacggaaccaagtcccgctcgccaacacattttgcatcgttcagatattgcgtctgcccggcaacggcgcagacatacgttggagagttttatgaccgatttaaccgccgcagcgcagcgcgcgctgtccttaatggatttaaccaccctgaatgatgatgatactgacgcgaaagtcactgcgctgtgtcatcaggcgaaaagcccggccggccagactgcggccatctgcatttacccgcgttttatcccgctggcccgtaaagttctgcgtgagcagggtacgccggaagtgcgtatcgcgactgtcaccaacttcccgcacggtaatgatgacattgagattgcactggctgaaaccaatgctgcgattgcttacggcgcagatgatgtggatgtggtgttcccgtaccgcgcactgatggccggtaatacccaggttggttttgatatggtgaaagcctgcaaagaagtctgtgcgaaacacaatgtgctgctgaaagtgattatcgaaagcggtgagctgaaagatcctgcgttaattcgtcaggcatctgaaatctccatcaaagccggtgctgactttattaaaacctccaccggtaaagtgccggtcaacgccacgccggaaactgcggaaatcatgatgactgtgatccgtgatatgggcgtcggtaaaaccgttggtttcaaaccggccggtggtgtccgcactgcggaagaagccgcgcagtatctggcgatggctgaccgtatcatgggcgaaggctgggctgactcccgtcacttccgctttggcgcatccagcctgttagccagcctgctcaatgcactgggctacgcagacgccaaatctgacagtaagtattaatcacgctttccgggccgcttttgccgcccggctttctgattaacccggtatctgtggtaccggggcggatccggtattttaaggagatctctgtgtttctggctcaggaaatcattcgcaaaaaacgggacggacacccgctctctgatgaagaaatccgtttctttattaacggcgtgcgtgataactcagtctctgagggacaaattgccgcgctggcgatgaccatatatttccatgatatgaacccgcaggaacgcgtctcactgacactggcgatgcgggattccggctcggtgctggactggaaaaaccttgatttaccgggccccgttgtggataaacactccaccggcggcgtgggggatgtgacctccctgatgctcgggccgatggtggctgcctgcggcggctatatcccgatgatctccggccgcggcctgggacataccggcggcacgctcgacaaactggaagcgattccgggctttgatattttcccggatgatgaaaccttccgccgtatcatcaaagagaccggtgtggcgattatcggccagaccaactcactggcaccggcggacaagcgtttctatgcgacccgcgatattacggcaaccgtggattccattccgctgatcaccgcctctatcctcggcaaaaaactggccgaaggactggatgcactggtgatggatgtgaaagtcggttccggggcatttatgccgacctatgaattatcagagcagctggcgcaggcgatcgtacaggttgccaacggcgcgggctgccggaccactgcactgctgaccgacatgaaccaggtgctggcatccagcgccggtaatgcggtggaagtgcgtgaagcggtgcgtttcctgaccggtgagtaccgcaatccgcgcctgtatgaagtcactatggcgctgtgcaaagagatgctggtttccggcgggctggcggctgaccgcacagaggcggaagcaaaattacagcaggtgctggataatggcaaagcggcggaaatcttcggccggatggttgccgcgcagcgcggaccggctgattttatcgaacgctattcgcactatctgccatcggcagtgctcagtaaaccggtctatgctgagacagaagggattgtgaccgccatggatacccgcgcactgggtatggcggttgtttcgctgggcggcggacgccgtaaggccagcgacccgattgactacagtgtcgggttaagtgatatcgcgccgatcaacagtgttgctgacggacagatgccgctggcgatgatccacgccaataatgaagatgcgtggaatgaagcagctcaggccgtgcgccgggcagtcacactcagtgagagcccggttacagataccccgctgatttaccgccggatcagcgaataagaacaattttgttattcacgcggagccctgcatcctgacgtgatctgacacaggagagaagtatgaaacgtacatttattatggtgctggattcattcggtatcggcgcagcacatgatgccgctgatttcggcgacaccggcgctgacacgttaggtcatatcgcacaggcctgtgcccgcggtgaagcagataaaggccgtaaaggcccgctgcatctgcctaatctgtcccgtctggggctgggtaaagcagctgaggaatccaccggacacttcccggaaggtctggataagaatgcggaaattatcggcgcatacggctatgccggggaattatcttccggtaaagataccccgtccggccactgggaaattgccggggtgccggttctgtttgactggggctatttcagcgatcatgaaaacagcttcccgcaggaattactggatatcctcgttaaacgcgccaatctgccgggatacctcggcaactgccactcatccggtactgtgattctggatcagctcggcgaagagcatatgaaaaccggcaaaccaattttctatacctctgcggattccgttttccagattgcctgtcacgaagaaacgtatggcctggaaaaactgtatgagctgtgcgaaattgcccgcgaagaactgaccaaaggcggttacaacatcgggcgtgtgattgcgcgtccgtttaccggtgaaaaagccggttcatttgaacgtaccggtaaccgtcacgactacgcggtcgagccgccgtcagcgaccatgctgcagaagctggtggaagagaagcagggcgaagtggtatctatcggtaaaatcgcggatatttatgcccatgtcggtatcaccaaaaaagtgaaagcgaccggtattgatgcgctgtttgatgcatcactggaagagataaaactggcgggtgataacaccatcgtgtttaccaacttcgttgatttcgattcctcgtacggtcaccgccgtgatgtggcaggttatgctgctgcgctggagctgtttgaccgccgtctgccggaaatgctgaagctggtgaaagaggacgatattctgatcctgaccgcagaccacggttgtgacccgacctggccgggtaccgatcacacccgcgaacatatccctgtgctggtgtacgggccgaaagtcaaaccgggctctctgggttaccgtgaaaccttcgcggacatcgggcagactgttgcatcctattttaatttatccccgatggattacggcaaaaacatgctgtaatgtgtcttttttttcgggcaggctttcagtctgccctttccctttggattgactgaaaggatttttttatggctacccctcacattaatgccgaacgcggtgattttgctgatgttgttctgatgcccggcgacccgctgcgcgcgaaatacattgcagaaaattttctggaagatattaaacaagtcaacaatgtgcgtggcatgctgggttttaccggaacctataaaggccgccgtatctccgtgatgggccacggtatggggatcccgtcctgctctatttatgccaaagagctgatcactgaatttgacgtgaaaaccattatccgcgtcggttcctgcggggctatcagccgtgatgtcaaactgcgtgatgtggttatcggcatgggcgcgagcacggattccaaagtgaaccgtctgcgtttcaaggataacgatttcgcggctatcgcggacttcgggctggtacgtaatgcggttgaagcggcagaaaccgccgggatcccggcgcgtgtcggtaatatcttctctacggatttattctatacaccggatccgcaaatgtttgacgtgatggaaaaatacggcattctgggcgtggaaatggaagctgccggtatttatggtgtggctgctgaattcggtgcaaaagcactgactatctgcaccgtttctgaccatatccgtaccggtgaaaatttaccggcagaagagcgccagactacttttaatgaaatgatcactatcgcgctggaatctgttttactgggcgataagaagtaatttatttcagtcattataaaaaccgctgccggtattatttccctgcagcggtttttttattttttactgttatcaggtctggtatgaatttctgaaacaccatttcctatcgtaattttaaaactaaagtcacaggttttattgagaattttagcgtaggttatggataaaattaatgttaataataaagtaaaataaggtgcctgattaaccgttacctgcaacagagagaaacggggggatttctcccccctcagcatcatttatcgttacaggacaatgttgcgtcaaccagcatatctccgcctttcaatgaaaaatcggatacccgatgattattgagtaacgaatttacaacatcagaaattgtaagagcagttattaataccactgcaactatagctaatgttgttattgatcttccggtcatttctcttgactcctttaatttaaggaggcaaaatccctattgtttggtagagattcagccccggtttatgttgaaaaacgtaatcggggctttcttctatccggaacagggaaaacatagcctgatccggacagaatcaggcacccgcagaaaatataacaactgtgtttctctttatctctgcctcattcgggggataatacggagatatatcacaaaatatattctcattattcgttaatacaatgattgttatttctgtcagttaacggaaataataaagccgctgttaagcggctttatattattatggcggtgtgagcataaataatttttcattctcaccgctgtagcgggataatgcccggtttatatcctctgcggttatctgattaactaacgcctcttctgcggttatccgcgtaaactcattatcgtccccggcaatctgagccagtgattctgtccagaaagccgcactctggtaaacctgctgtttttccagtaaccagttggctctggcttctttcagggcattgtcactcacaccgtctgttttcagggttttcagcacattccggctcagtgctgtcatctctgcggcgcgctgaggatcggtggtgaaattcagccgggcgctgtagtacggtgacggcagttttgccagcatagaggataaactcagggcgtaaataccgcccgcctgttcccgcaatgcgctgcgcaactgtttgctgatgatgctgtcggccagttgcagtgtcaggctttctttcagtgaccactgtgccggggcggcatactgaatactcaccatggttttatcagagctggctatcgggtaagtccggctgaaggattgcattttgggtgcgatagccggatcccgccactgcaggcgctgcccggaagcgggaagggtggcgatccatttctcaacagcctgttttatctgttttttatctgccgcaccgctgatcaccagtgtcatgtcctgtaccgggctgagcaggagacggtggttctgctgtaactgcgcggcagtaaactgacgccagccgccgttttcatttatcaccagacgttcgccgtgagtatgactttcacggttaatggcatccaggaagcggcgctccaccggagtgctgttcaggctttccagtgtcagctgctgattgcggagtaatttttcgccgctgaactgcggctgtgtgatcttcagatgcagcagtttcagcagggtatccagttcttccggcggggcttcaccccggaatccgtgattcagcagctcactgtacggccgcaggctgagactgtgctgtttgctgaataaggtcagctcacgggcactcagctcaccgtaaccgctgctttccggcagtttcagtgcccagtcggtcagtccttcctgtccggccggctccagtgagcggccgcccggaatgcgcagattgatctgaatattatctttcaggcttttatcctgatgcacaatgacccgcagaccgttggataactgccacgattccgtggacggtaacggcagtgcctgctcctgaacaatgctgccggccgccgccggggtgacattcagcgcgacctgccgcacggtcagggaaaacggcccgggggcggactgccggatctgctgccagcggtcagtgaacgctttctcatcaaaacgggcctgttcgctgtccggcccgagcagcgccagccgtggtgatgcctgattcaggaatccgctcacatgggttttcagcgtatccggtgtgaccggtttgagcagttcccatgctgtggtgagctgctgacgtttgtcctgaaccggcattctgtattccagtgcggtggtgatggtatcggcgagataatcattaccgtagcgggattcaccggcggcctgctgactgagtttcgccagcaggctctgccgggcatcgtccagctctgcctgtgtgacgggttgtgtcgccaggcgctgaatttctgtccacaataaggtgatactgccgaggtaatccccgccctgcggatgcactatcatcagttgctgaagacggcggctgtccagcatggcgccctgcgggttgatactggcagccggtagctgtccgttatccaccagcgcggtcaggcgctggttgaggatagtcacccagagattatccagcaggtcatcatactgcccgtcacgggtattgagcggcgcgcggatatcccgctgcagcgcgaactgcataatgcgctgtccctgctctttatcgaagacgggttttaccagcagtcctgggtgcggggcaaagcgctgacgggccggatcatcctgtgcggcatcttctttggcgggctgattaaaatacgcctccgccagattgctgacgtcgtggcggttaaactgtccgataaccaccagactcatccgctgcggctgataccaggtctgataatagtcttttgctgtgctgaccggtgcatggcggatcacatccaataacccgatcgggtcacgctccgcatagagactgcccgcatagcgcagttgctcaagggcattattgatgcggaagccgatgccctgacgcagccgccactcctcaataatcacggaacgttctttatcaaacgcaacagggtcaaaggtcatgccctgtgcccagtcggcgagtacctgcaaaccggtctgaatctgttccggggtggcctgcggcagcgacagtttatagacagtggaattgaggctggtggcggcattcacatggctgccgagattcagcccctgtttttccagctgtttaaaactctgtgtgtccgggaaatgcgtggtgcctttaaaggccatatgttcggtgaaatgcgcgagaccgcgctgctcttctgtttcctgtaatgaaccgctttccaccagcagccgcagctctgcgccgggctgcgggcgtgacagaagatacacattcataccgtttgccaggcggatgtgctgtaaatcactgcgctgcggcagcggacggttatctgtgccggttgtgctgacagcggtacagccggtgaggatcagcaccacaccggcaaaggtcagtttataatgcatatcggactcctgatgtgcaggtggcggcaggggcggacagggcgatcacgcgatctgcctcctgctgaagaaaacgctggtggctgaccagcagaagcgtgctgtccggcagacgctgacggagcagacggatcatgcggaccgcattgtcatcatccagtgcggaggtaatttcatcgagcagcatcagctttggctgactgagcagcagacgggcgatcagcaaccgctgctgttcaccgccggacaggcgctgacgccagtcggcatcggtatccagttgtggtgtcagtgcagcaagcccggtggcgtccagcacttcgcggtaagcctccggcgtgaactgtgcggcggtatgcggataggcgagcagggatttcagtgtcccggacggcagataaagtgactgcggcacccacattacatcctgttcacggctgatattgccccggtaataaggccagtgaccgctgagtgtgcgcagcagagtggatttacccagtccggagcggccgctgataatggcaaattctccggcgtgcagagagagtgagacattctccagcagaggacgattatccggcagcagaatatcggcgcaaacatccaggcgcactgccgactgacgggtttcggtgacatcagacaccgcgtcattttccagcagacggacgaaatggtacagacgggttaccgtcgcctgccaggccgctatctctttataggcaaaaataaaccagccgagtgacgtcgcgacactgctaaaggcctgacgcagctgcattaatccgcccagcatcagttccccggcgaggaatttcggcagagcaaacaggatcggtgccagtgcggtcacctgctgataacccacggtataaaaggataaattccgctcgcagcggatcagctgattccagttggccgccacccgggcaaagcgggccagcaattgctgtttatcctgtaactccccccgctgtccggcaatggcatcgccgtgctgtctgcgggtgatcagtgccgcacggtaatccgcctcacgctgctgtttttccatattcagtttgcgcagcggcccgccgataagctgtgtcagcgcgatacccactaaggtgtaggcgatacaggcccagaacatatagccgtcgatgcgccagtcagtaccggcgacagagagcagaatactgccggaaagctgccagaggatggcggcaaaggaaatcagggtcagcagtgaatgcaggaaggtgatcagcagactgagggtagattccaccagcaggcggacatcctcggcaatccgctgatccgggttatccggctcgcgggcggtcaggcgcagcaggtaatggcggctctgcggcgacagccagcggctgaggatctgttctgtcatcccctcccgccagcggatagccagtttctgccggaaatacgtgccgagcaccaccaccagaatcagcccgctgaccagcacgacgaaaaatttgatcagctgatacagcgccgcgccgtccagcttttgcagtgcattataaaaatccccgttccactggttcatgcggatattgaaccagacggaggagagtgtcagcccgagagacaacaacagtaagaaccagcaaaacagggcggcacgccgcccccagaacggcttcaccagccagaaaaattgttttattgttttcattgattattcataacgttaagagtcattgctcacatgctcagattaaaaatcgtaattcagctgtaaccagaactgacggcccggatcataggcaatcaccttgttaccggcgtagataaaggtatccgcgacatttttgttattcaggacgttattcacttccagcgagacagacgcgccgtaagcaaactccggtttccagttcacgcgggtatcccaggtgaatttggatgcgaaatgctctttctgatagacacgtaactcgccgtactgcggatcacggaccacttcgttgtcatgacggacagcctgattacgcgccccccaccattgcaggcggttgtaccaggaaatgttgtagttatcccagtcactggtcagctcaacgttcagcttcagtggcgagttaaagttgctggcaggcagatcactgacatcgatcactttgccgccgtacatcactttgtcggagttaatggcagtgcccggttcaaagaaggcatagccctggtcagacgggaagttggttttggtatcctgccagacgattgaggaggtaaagacatgggttgcctgtccccattcccacggctgactgttgctgacagccagggtaacggagtcatgtttgctgcgtccggcattatcaaaggtacggatttttcctttatcggagtatttatctgacccggtcaggttgttgtatttggtgcggctgcggacttcatcgtaaccttcacggtggacataggtcagacgccaggtggtgctgaggatttcctgttgcaggccgagggaaatctcatcgttatacggggttttcagtgaatccaggccttcataatcattggttttatcccaggtcggatccatgcccataaagccgcacatatagcatttttccagcccggcattctgcgcgccgtacagggcataagtcagcatggagcggccgtaataacggttggcaccggcgatcagcaatgtttctttattaccgaacaggtcgtaagtggcggccaggcgcggcgcgatattggtttgccggacaaaatcatcccggtcaacacggacacccggacgcagtgtcaggcggccgatttcaatattgtcatcggcaaacagggagtagttgttataactgacagaggcggttcccggcaggaagcggtgcttgttgactaccggatcctcaaacccccattccgcatagctgacatagtcctcgctggtgtgatagtgcgacttatcgcggatatagcggcctttggtatgggtggattccatcccgagtgtcgggcggtgtgtgatcccgaagccttctgacggcaggaaacgggcgacggctttggtggtgacattgtcctgctcggtccgcagatcacccagtccgcccattttggtgttaacaatcgtttttccgtccggtgaccggttcttcatttcatagaaattctgctcgtcattcacgcggttatctttcagtttctgataacccagggtgaattccagatcagccaggctggtctggtgtttcagaacaccggtcacacctaaccctttgtggttattgtcataaccggagttggcaatattggaggcgaataaacgcgccttgtagtcagaataattcagggaaatatccgccgtggtgaccggcgagagatccattgcatacttcacaaacaggttgtctgaggtacgtttctggttgcgtttgcgcttatcaaactcataaccgaccagttcttcaccttccatcactgccatcagtaccgaggtattggccgggatggtggaggtacggcgggaggcggataccgtcaggccgctgttttctgttacaccgacttcaaaccagccgccgaaatcgtgtttgttatattcattctggaaacgggccgggtgactgatatcattttttgatgaatcaatcggctgtgaggaatcctcaaacagatgattccaggaggagcgggtggtgcggtaatacatatggccgctgttttcgccgttccagcggcggctggtgacatccacactgccgccggtaaagccgccgaattccaccgggatgttgttatcgtaaaccgtcacgctgtcgatcagacggctgtctatatacatgccctggtcgccgctgtccagacgggtggaggtttcacccagggtatcttttgccgggtcgaaatcgttgttaaaactgatgccgtcgagtttataggcgttctggaaactggatgcgccgtgaatggaaatccgtgatggtttgatttcgccctggttgagggacgagctgtcattaccggcgaactgtaccgccgggttggtgcgcagcagttccgtgacgttgccgtcgccggtattgcgctggcggatctcctccgcagtaatgtattgcggggcagacatgacatccgtggccggatggtaagccagttcgccctgaacccgggtttccgggattaaaatggtttccgcttcggttgtcagcgggcggataacatagctgctgccctgctgcaccagcgtcaggccggagcctgccagcagtgtccggatggcggtctgtgcggaatagctgccgtgcagagccggtgcccgcagtgcgccgagttgtccggcatcatacagtaactggatttgtcccttctgtgcgatggtgttcagtgaacggctcagtgcctgttcgggcagatcaagcgtgagatctgcggctccggccggtgccgctgtcagcccgagtgccagcacaatggcagaactggccgccctgatgctgaatggtgatggttttattgtcatttttatcatttccggaagtgtcatagttatcccctgtatcagaagacgcggaaatgagaattatcctcacctgataattattctttttttcatttatttttatttttcttcacaatcaacaggctgccgtcatgcagttcggtgacttcaaccggtaacagcagcggcaatgccgtgaaaaaggcatcggtttcggaaagggtgacccggccggagacggtcagatccgccgcattcgcggcaagtgagacggggtggttgctgtaaggtgcgaggcggtcaacaacatcacgcagcggggtatcggtgagggtgatctgtccgttgcgccactccccggcctgttccggcgggatatggctgagcagcagtgcagcgccctgcgcggggctgacagctttatccccggcacgcagatacaccggtttttcatccggcgcatcccgcagggcgacaatcccgtttgccacagagactgccacttccgttccccggcggctgacatcaaattccgtgccgacaaccgttatctctctgccgtccgcgcggataacaaacggccgccacgggttggatttcacctgaaaaaaggcggtaccgcgcaccagggaaatacggcggtgtgtctgttcataggtaatatccgcttcgctgtcacggctgagaaaaatgcggctgccgtccggcaggatcatggatttgctttccgcggcggtggcgagcgtcaggttatccatcagcagggcgggtaactggctgtagggcagaaacagcatcaccaggataaacagtccggcgagggtatggcgcagcgggcgcagaagcggaaaagcccgggcgggtgcctgctctgtgatttccgggcgcggcagggccgacatctcccgccacagcagcgccatatcatcaaacgcctgccggttttccggggaagccgccagccatgcctgtaattcccgctgctgctgtgccgtcatgctctggctgtgccagcgcgtaaaccacagtgcggcggcgtcttcccgttcgtcctgctcccgccggtctgtcattccccgtccttctgctctgcggcattcatggcgcgtttacattgcagcagggcacgggcaatatgcttttccaccatactgacagaaatatccatccgttcggcaatgtcactttgcgaaagtccgtcaaaccggtaaagcacaaaggcttcccgctgacggggcggcagttcattcagcacctgatacagcctgtccagccgctgccggtgttcgagctgtacctgaggatcggcgtgtgcctgtgccacttcctctgtcagtgaatcatcccactcactgacccggtcacggcccttccgccggctgtgacgccagtggtcggtcagcacattgttggcgatcttaaacaggaacgcgcgggtttcctgcacagatgtctcgttgccgcctttgagccagcgggcaaacacatcctgcgacaaatcccgtgcatcctgactgttgcccagccgcttatggaagaagcggacaagctgatggtaggttgagtgataagccccggcgataagcctgcttaccgatttttcagtcgtcatttttctggtgtgtatcgaagtcatcgtaattgaaggagtcattacgcattgcttagaaaaatccaaaaaatctcattgttgttatttgaattattatttaataataaaaagcaatatcatttgcgttatcattatgcctgtaattttacaaattgaaatacgtgaataacgattaaaaaagtgagttgagtgatgttgaatgtggctgcggcctgttatcagaacaggcgatattcagtcggcggcacagctgccagtgtgggtgctcacgcgctgctgctggcactgtttctgggctggctgggtttttcagcggatgagccgaaaggcatgctgcccccggcgtttgtactgatgccgggagtttatcagctggaaagtgcaccgccggaaaaggcggaaggtgtcagacaggtgatgtcacaaccggcaccacagccggtggctgagccggagcgggagtctgctgtcgataaactggcggtttctgaccagggcacctggacacggaaagcggaaaaaccaaagaaaaaagcggacaaaaaaccggtaacagagatcaaaatgccggaaacggataatccgtctccggtactggcagaaagcacttccgcgccgcgtcagggcgacagttccgcgagccgtgcggattttaccagccatgcaccgcagccggtcagcggcagtaccggctgggaaagctcggtacattcgcatctggcgaaatataaacgctatccgcgcgcactgctgcgctataaatccaccggcgtttctcatgtgaaagtgactctgaacatgcagggaaatgttgtctctgcggagctggttaattcatccggcacaaaactgctcgataaagaagcgcttgccaccgtacaacgggcatcacctttcccgctgccgccacaggaacgcggcagaaacggtcatattgagatagtcactcccatcggtttttacctgtaaccagcagacaattcccgaagttacgtttttattaccaggaattgtctgtattttccgcatttttgtttcccttgttatcttttctctgcttaatatttcggtttttctgtggttttcttaatttatctgaatgagtttcagttactcatattgcaacaggcgcagtaaagcgggttcagacctggataaaatcctgtgatgacgtgttatgattatattttccgaaagaaaataattaatattattaatatataatactaaagagaattcaaccgttataatcaaaaagagtgtgttaagctgttaagaaatgtgtaactgtcatgctgataacatcacctgcgagcccgtgtgtaaacatcataatgctttggcaaataatcatttttagtctgtttacgggtaggttgttacaaaatatttcattctgaaattatcagagaaatatgtaatgatgttattattcagcagcaggattgaataaaagaatttaatatatgagaaatccgatttttaccacgattcattaatatgcatcattttcggacgtgattttagtggtataaactctgttttctttggtagattaattttttataggtgattttgcgtaacgccggattaactcaaaattaaacattgtaaattttagttaggtaaggacaagtaatgactaaaaagtcagtttttgcaagaacactcgtctctctgctgttaggtacagcaatcagtgcttcagcgctggctgcggcagaaaataccggtcatacattgcggctggccatcggcgcagaaccgacagaagggtttgacccgatgctcggctggagccacggcagttatctgttactgcacagcccgctgctcaaacaaaaggccgatctttcctggcacagctacctgctggacagctacgaccacaatgccgacggcaaagagtggacactgaagctgaaaaaagacctgaaattctctgacggctccccgctgaccgccaaagatgtggcgttcacctataacaatgcggccgccggcggcggtaaaatcgatatgggtaactttgccaaagcagaggaaattgatccgctgacagtgaaaatcaccctgtccgaacctcagagtacgtttatcaacgtgctcggctctctcggcattgtatccgccgataaatatgatgccagacagtatgcccaaaaaccggtgggtgccgggccgtaccgcctggtagctttccagccgggccagcagctgattgttgaggctaacccgtactacgccgggccgaaaaatgactttaacaagctggtgtttgtcttcctggatgaggatgccgcctttgctgccgcacagagccgccagcttgaggttgtccgcattccgccggtgattgccgcaactgccggtgatgtcaaagggatgaaactggtggaacgcgccagcgtggaaaaccgcggtattgttttccctatcccgaaagccggtgaaaaagatgcacagggttacccgatcggtaacgatatcacctctgatgttgccatccgtaaagccatcaactatgcgattgaccgcaaactgctgtctgagcaggtgatggaagggtacgccgtaccggcctttaccggtgttcacggcctgccgtggaacaacccggaagccgcctttaaagatggtgatgcggaaaaagcaaaacagattctggaagaagccggctggaaactcaataaagacgggctgcgtgagaaagacggcaaagtcgccaaactgacgctgtggtacaccagcggggataccacccgccgtgacctggcacaggctatccgcgccttcctgaaaccaatcggcattgaactggatttacagtccggcagctgggaaaccgtcgaacgccatatgcacgccaacccgacgctgttcggctggggcagcctggatccgatggagttagtccatcactacagcagcaaagcggcgggtgtggaattctacaacccgggctattacaaaaatccgcaggtggatgccattcttgagaaagccatgagtgcgccggatcaggaagccgccattcctgtctggcagcaggtggactggaacggcaaaaccggtaccgggattaaaggggatgccgcctgggcgtggctgctgaatgtacagcatacctatgtggtgagtgattgtgttgatttgggcaagggggcaccggagatccacgggtcatggtcactgctcaacagtgtggatgactgggcctggacctgtaaataatgcgcagtgccctgctccttttcgtgcggtttgtttgtctgctgacggtcacggcggcgggggtatttatcctcctgagctattcgccaattgacccgatcagagcctatatcggaaatgatctgctgcatgtgccgccggagcagtatccggcgattgccgcccgctggggactggatcagccgctgtggcagcggttctggatctggttctcacagatgctgcggggcgatctcggttactctatgctgtataacgcgccggtgtcagaggtgatttcggcgcggctcgggccgtcactggcactccttatcagcgcctggctgctctcgggcattgccgggctgctgctggggctggtggccgggcgttatctgaaccgctggccggacaaaattatttcggcactgtcgtatctgctggcttcgataccgacgttctggatagggttgctgctgctgtcgctgtttgcggtcaccctgaactgggcaccaatctgctgtgcctggccgatgggcgaggatgcggatacagcaaccttcgggcagaaaattcatcacctgattctgccggtgctggcgctgggcttactcggtgtcggtaacattgccctgcacacacgggcaaaagtggcggaagtgatggggaccgaatttatccgttatgcgaaagcgcagggggataaaggctggccgatgattaaatttcatgtgctgcgtcacgccattaccccggcactctgtttacagtttgcctctgtgggggaactgctgagcggttcactgctggcggagaaagtgttcgcctatcccggactgggacaggcgacgatagacgcggggctgcggggggatatcccgctgctgatgggtattgtgatgttttgcgcgatcctgatttttatcggtaacagcacggcggatattttactgcgccgcgtgaatcagggagtgatccgcgaatcatgacgtataacccgaaccgtgcgctgttaaaactgacgggcacattactgatgctgatcctgctgggcgtctatgccatatggatcacacacactgatattgatatggatttcctggcgcggcggcaggcaccgtctgtcacgcactggttcggcactgacagcctggggcgtgatctgtgggatcgcacttttcagggcatggcaaccagtctgcagatcggactgatttccgccctgaccagcgggctggtggcgctgacaatggccgggttatcaacggttaacaaaggaacagattatctggtgcgcggggtgattgatgcactgctggcgctgccgcatctgctgctgctgattttaatctgtttcaccctgggcggcggaaaatccggcgtgatctgggcgatagccctgacacactggccgaaactgacgctgatcctgcgctcggaaatcctgcgggtgcgggaaacggattatgtgatgctggcacaacgcatgggaaattcgcgattgtattgctggcgtcatcattatctgccaatgttattaccgcagtggattgtcggcacactgctgatgttcccgcattcggtactgcacagtgcggcgctcagttttctgggcttcgggcttgcgccgcatgaggcatcactggggatcctgctgtcagatgcactgcgctatctcagtaccggtgcctggtggctggcatttttcccaggactggtgctggtcggactggtgttactgtttgatcagtttgcgaaagccttacaacagctctggctgaggatcgcataatgctgaaatttgaccggcttgccattgatgtcgcacagttcagctggctgcggaaaaaacgctggcagccgctgctgacagatatctccctggtagttcagcccggtgagctggtggcgctggtcggcagcagcggggaaggcaaaagcctgctgctgcaaagtgcactggggcttctgccggataatatgcgctgccgtggcgctatctcgctggcgggggaaaccctgacggaagagagcaaacagctgcaccgcggcaacaccctgtgttacgtaccgcagggggtgagtgcgctgaatccgctggtgcgggtcggcccgcagctggaacgcgcggccacactcagcggtatgcatgtgaagatgcacgacgtggcgcgccagctgcaacgttataacctccggcctgagctgacggatgcgtttccgaaccggctctccggcggaatggcaaaacgggtgctgacctgcggcgcaacgctgaccggggcgcagtatattctggcggatgaaattacatcctggctggatgacgaacatgcggggcagatactcgcgcatctgaaagtgctgtgtgcggacgggcgcggtgtgttgtgggtcacgcatgatctggcgatggccgcccgctttgctgaccggattgccgtgctgcgtcacggggttttacaggaaacactgacatcgcaggcattactgaacggggaaggcagcccgtggctgcagtcactgtgggacgcactgccggaacaccgttttctggcggggcggaaatataccgggatgaggcggtaataagaatgacggatgaatacaggtgataatccgctttaattcgtccgtatatgagtattttttatttatttgctgaaaatcagcagggttatttattttatatttaaacacagtagcggatattaattcatttatatgcggtaacggaaactccgcatagtctgaaagggatctgaacctcgttttcttatcaggagaacagcggtgcatgatttatttttttatggctgattaacagcttacatttttcacgctttagtatttccgggtgtgcgcctgcgcatgtccggcggtcagtggcggattgtgtctgcattcagcggatgcgtcactgaaataaaaactgaaatcacggtatcccggaatactgatatccggattgctgtctgatgactctgttttcattcaattgtggaggcgttatgcaattaaccccgagagaagttgaaaagctgatggtatataccctggcggatgtcgcgcagcgacgtcgcgacagaggggtaaaactgaattacccggaagcggtcgcgattattaccgtgacagcactggaaggcgcccgtgacggcaaaacagtggaagatgtgatgaaagaagctgccaccgtactgaccaaagccgacgtgatggaaggggtggatgatttaatcccgaatgtgcaggttgaggcgattttcacagacggcagccgtctggtgacggttcataacccaatcaaataaacgtacagcaaaaaggtgaggttctgattatgagcaatacaaaacaacccacgccgttaggcggagtcatttttgcggataccccgattgaatttaataccggtaagccggaaaccaaaattaaagtccgtaacaccggggatcgcccgattcaggtcggttcgcattttcatttctttgaagtgaaccatgccctggaatttgatcgcgaagcggcttacggcaaacgcctgaatatttcatccaccaccgcaatccgttttgagccgggtgatgaaactgaagtttctcttattccttacggcggcaaacagacagtttacgggtttaacaacctggtggacggctgggccggtaataatgtggccaccagcgaacgtccggcaaaagcgattgctctgaacgaagcgattgcccgcggtttcagccataaagcagaagcgaagaagtaattctccgtcctgacacgattttccggcagtgatgcacaggcatcctgaacgaaataaggaacacgttatgccacagatttccagacaagaatattgcggcctgttcgggccgaccaccggagacaaaatccgtcttggtgataccgatctctatatcgaaattgaaaaagacttacgcggttacggcgaagaatctgtttacggcggcgggaaatccctccgtgacgggatgggcgcgaacaacacgctgaccagcgacaacggcgtgctcgacctggttatcaccaacgtcactatcctggatgccaaattaggcgtcatcaaagcggacgtgggtgtgaaggacggtaaaattgtcggtatcggcaagagcggtaacccgaacctgcaggacggtatcaccccgggaatggttgccggggtatcgactgatgctatctccggtgagcatctgatcctgacagcggcgggtatcgatacccacattcacctgatctcaccacagcaggcttatgcggcgctgtccaacggtgtcaccaccttcttcggcggcggtatcgggccgacagacggcaccaacgggacaacggttaccgccggtccgtggaacatccgcgcgatgctgcgttcactggaaggtttaccggttaacgtcggtatgctcgggaaaggtaactcttttgcccgcgatccgctggttgaacagatcattgccggtgttgccggtctgaaagtccacgaagactggggtgcaacctccaacgccatccgtcatgccctgcgtgtggcagatgattatgatatccaggttgcggtacatactgacagtctgaacgaaggcgggtatgtggaagataccatcgaagcctttgaaggccgtactatccatacttaccacaccgaaggtgcgggcggtggtcatgcgccggacatcatcaaagtggtcagccagccgaacgtgctgccgagctccactaacccgacactgccgtacggcatcaacagccaggcagaactgttcgacatgatcatggtatgtcacaacctgaacccgaatgtcccggctgacgtttccttcgcggaaagccgcgtgcgtccggaaaccatcgcagcggaaaacgtgctgcatgatatgggtgctatctccatgttctccagtgactcccaggcgatgggccgtgtcggtgagaactggctgcgtgtgatccagaccgctaacgcgatgaaagcggcacgcggcaagctgccggaagatgcggcgggtaacgataacttccgtgttctgcgttacgtggcaaaaatcaccatcaacccggcgattgcccagggtatcagccatgtgctcggctcagtcgaagtcggcaaaatggcggacctggtcctgtgggatccgcgtttcttcggcgcgaaaccaaaactggttatcaaaggcggcatgatcaactgggcagcgatgggtgaccctaacgcctccctgccgacgccgcagccggtcttctatcgtccgatgtttggtgcgatgggtaaaaccctgcaggatacctgtgtgactttcgtttcccaggcagcactggaagatggtgtgaaagagaaagccggtctggagcgtgaagttgtcgcggttcagggcatgcgcaccaccaccaaacgcgacctggtccgtaacggcgaaaccccggatatcgaagtggatccggaaaccttcgcggtgaaagttaacggggaacacgcgacctgccagccaatctcggtggcggcgatgaaccagcgttatttcttcggctgattgacttccccggcgggtgttgttctgcccgccgggcataacaaaaaggtaattccatgatcctcattgagcacattctcggcaacgtcagaaaagatcaggcgtgggctgataaagcgaacgaaatgacggtggatatgctgatcctcgatcagcgtgaagcccagaaaagccgctgccgtaaacacacccaaaacgggctggatatcgggatcgcgctggatcgcaacgtgctgttgtctgacggagatgtgatccacaccgacgacgccaccaatacgatggttgttgtccagatcgatctgcgtgatgtcatggttgttgatcttaaacgtcttcagggcagcacgccggaagagcagatccgcatcagttttgaactgggccatgcgctcggtaaccagcactggaaagccgttatcaaagaaaacaaggtgtatgtcccgctgaccgtcagtgaaaaagtgatggaatcggtgatgcgcacccacggcttcggcaatgatacgtttgccttcgtcaaaggcgaaaccattctgccgatcctgaccaactcagaatcccgtctgctgttcggcggcgcggaagagacagatactcacgtgcatgtggcacataaccacgggcactcacattcacacggccacgatcacgggcacagccatgatcatgaccacagtcacgaccacggccatgatcatcaccacgaccatgaccacaaacactgacagaccggaacgggagaacgtgtgatgaaagcggctgatcttatccggatcatgcagtttggtgattcggcacttcccgtcggcgcctttactttctcaaacggtgtggaatcggcgattcagacgggtgtggtacatgatgccgaaaccctgaaaggctttgtccgcaccgcgctgaaacaggcggcgagcggtgacggtattgctgttgtcgcggcacaccgcgcagtgcttgccggtgataacgacgccattctgcgggtcgaccgggcggtgaataaccgcaaactgaatgaagaagcccgcctgatggcaacgcggatggggaaaaaactggcggaaatttctgtccatatttttgacgatccgctcgtggcatggtggctggcacagattaaaagcggggacaccccgggcacccagcctgtcactcaggctattgtgatggcggtacagggtatcggcgaacgcgaagtggtggttatgcatcagtacgggatcgcaatgacgatcctcagcgccgccatgcgcctgatgcggatcacgcactttgaaacacagcacattttatttgagctgaacaacgacattgaaaccttctgcgatattgcagcctgcggcgacattgaacagatgtcttcctatgtgccggtgatcgacgtccttgcggcagttcataccaaatcttttgtccgcctgtttatgaactgacaggcggctgacttattttccgggagtatattgatgaaaaaaatgacacggatcggcatcggcggccctgttggttcaggtaaaacggcgattattgaagtgatcaccccgatcctgatcgaacgcgggatcaagccgttaatcatcaccaatgacatcgtgaccaccgaagatgcgaagcaggtcaaacgcaccctgaaagggatcctcgacgaagagaaaatcctcggcgttgaaaccggtgcctgcccgcacactgccgtacgcgaagacccgagtatgaacattgcagccgtggaagatatggaagagcgtttcccggacagcgacgtcatcatgattgaaagcggcggcgataacctgacgctgaccttcagcccggcactcgctgacttctacatctatgttatcgatgtggcggaaggggaaaaaatcccgcgtaaaaacggcccgggcctggtgcaggcggatatcctggtgatcaacaaaatcgacctcgcaccgtacgtcggtgccagcctggaagtgatggaaagtgacaccaaagtagtgcgtggcaaccgtccgtatgtcatgaccaactgcaaaaccggcgaaggcgtggtggagctggtggatatgatcatggataaattcctgttcacccaccaggcgggagcaaaagcatgacacaactgagggctgagatcgcggggacgccgacacgtctccgggctcatctcttaggggaaaaggcgccggaaatggcgccttaccaggatgagccaaagcagatgcaaagtggtgccatcgggaaaagcggctatctgaaactgcggtttgccaaacgggaataccgcagtgaaatggtggaaatggagcgccgtgtgccttctctggtgcagcgcgcgctgtactgggatgaaatgatgccgcagatgccgtgtgtcactatgatttccacctccggctgcctgttacagggcgaccgccaggcgctggatctgattgtggaagagggggcgtgcgcccatgtcaccacacagtccgccaccaaaattcacatgatggaggcgaactacgccacacagtaccagaatgtggtggtggaagccggtggttatctggagtttatgccggatccgattatcccgcaccgtaatgcccgttttttaacggacactcagatcacggttgatccgacagcaacggtgatctattccgagatcctgatgtcggggcggaaatatcaccatccggacgaacagttcgggtttgatattttttcctcaaagatccgggcgcaggacaatgagggaaaagaattatttgttgaaaaatacattctggaaccgaaaaaagaagcactgaatgtggtcggcgtgatggggggttttgatgttttcggtaacgtgattttactgacaccgaaagagcatcatgcccgtatcctggagcgtctggaagcccgttatgacacggatgaagaggttgcattcggggcgacgcagttgccgaacgagtgcggtctggtcttcaaagtgctgggaatcgacagcccgaaaaccaaagaggctgtccgttatttctggcaaatcgcccgggaagagatcctcggcatcacattgcagaaaccgttcctgtggcgctgatgcgctgcaggatgacaccggtggttactcaggggactggttattatcagcataatcagtccctttgtccggtttaccttcaggggaaagacgatggcaacttcaacagtcagtcagaacggctggaataaactggccggatccaatcctgtcatacattttattgatatcacgctgcgtggttgtgcgcaggtgatgtttcagaacaacccgctgaccgggctgttctttttcgccgctatttttatcggtgcatacagtgaaggcattccggcggtcggctggggctgtctgctcggtaccgtggtgtccacgctgacggcgtatgtcagcaaaatggatgtcacttcactgcgtgccgggctgtacggctataacggctgcctggtcggtgtggcgctgccgaccttcctggataacacaccgtttatgtgggcggccattgtgctcggcagtatcgtggcggtgatcgccaccatctcactgaccgatttcctgaaaaactggaaagttgctgcgctgaccgcgcctttcgtgctggtgacctggactatcctgctggccagttacagtttcttcggtatcaaaggcgtcagtctgccggggccggcactgccggatcagtatgtggcaccgatcgccgggatcccgtattccgatctgatcccggatatttttcgtggtgtgtcagaggtctttctgctgagcagcattaccgtggggatcctgtttgtgatcggtctggcagtcagttctgtgtgggcggcggtctttgcggtctttggctcactgctggcttttggtgtggcatctttcctgaaagcagacttcggtagtgtgcataccgggctgtattcattcagcgccgtgttaactgcgatcgcgctgggttccacatttaataaaccgagcttcaaagtgctggtgtataccgtagtgggtgtgatttttacggtgtttgtccagggcgcgctggatgtggtggtctcgccgttcggtattccgacactgaccatgccgttcgttctggcctcctggctgttcctggtgccgaatcaggacatcatgccggaacaccgtcagtaaaaggggagaaatatgcagagtaatctactgaagacagggttacataaattactgagtctgcgggtgatcctgtcggtgctgctgtttattgacggggtgatgatcctgtcgccggtgctgttttcctataccggggatattgcctggcaggacggcggtttcaccgcgtggttacagtcgctcgggtttataaaactgctggatattccccgctttatgctggggttactgctggcactgctggcgctgctgatgctgaccggcgcacgcatcgcctggctgttctccctgtttatcctgctcacgatggtactgatggatctggggctggcccgggaatactcactgcaggggttgttctcgctggcgctgctgattgcgtccggctgcctgtggcggcagttcccgcatcacagcctgaccagtgccggcgtggtggcggtcagcagtattatcctgctggtggtctattccgtcttcggcaccctgtatctcggcaatgagttccagccgcatgtcacggatatctcagctgccttctactttgccctggtctgtatgaccacggtcggcttcggggacatcatcccgatcagcgtggaagcgcggatgtttaccctgacggtggtggtgttcggtatcacgattttcaccacatccattgtgtacattgtgggtgtcgtcctgcgcggcacacgcgagattgtcaaaaagaggttgttacacatgaaagagcattatgttgttatcggcgcgaatccgctggcggtcaatatctataaaggactgaaaaaacgcggtttgcaggtggtggtgatctgttctgatgaggacaaaaagcacttccctgacggcaccgtgaccgtggccggtgacagtgccgatgccgtgaccctgaatgaagctaatgtcaaagatgcccgttgcgtgatggccatcggtgataacgacgcggacaacacctttgcgctgctggcggtgaaacagctggccggtgaaggcgtgaaaaccgtgactgtggtgaatcaggaagagaacagcgacaaaatgcgcctgctgcatgcggatatgaccttctccctgtcacagctcggcagtgaagtgctgatgaaaatgctgtgcggcgagaacatcaataacagtgttatggctgacatcttattagccaaagcgccataagcagggccggttgtgaagcataaagaaaaaaaaataaatctgagccacgggatctctcgggctcagtcattcttctattcccggtttaaacagctgcacggcatccgcattgcgctggcgtttacactgacgtttctggtattccgggaattacacagcgataagctcgattatatcattatgacacttatctctatcctgatgccgatgccgtactggggaaatgtgctgatccgctctatgcagcgcaccctcggcaccgttatcggctcactgatcgggatgttgctgctgtacacggaaacccactctttcccgctgatgctggcgctggcgactattgcgatgtttgtctgcggcctgatcgcgctgggtaaaaacatgtatgtcgggatgctgatcgggatgaccatcagtatcgttgccaccgcaccggtcggggatatggactctgcgctgatccgttcggcgcagacggtgggcggctcgattctggcactggtgttctcggcgattctgccgctgaaagggtttgtgttctggcggatgaatatcagcactattctgcgcgatattgccagattatatgatgagcacatcatgaaactgagcagtaccgacccggagcgatgggataatcagctgaaagacacgttatccacactgctgacctgtaatacctacattgcaccggctgtcaaagaaacccatgttccggctgccacctttacggccattcacgggcgcatccggcggctggtggcgatactggaactgctgaccgataccttcagtaaaaactacttcgctcatgcgctgaacaccgaaaatccctacattgtgcagttgcagaaaagcaacagtgagatcatgaaactgctctctgatatctttgtgcaggggaaagacgatgacaccatggataagctccaggcactgcgtgccagcacacatgagctgcatcagaagatcaatgcacagccggaaagtaactcggcggatgccatgatggtcgggatgagtgtggaagtaatcaagctgctggatgaagtgtgcgggctggttcagattgacattttaaagaaatgcgcataaacacagaaatattgaaacaaaaatgacgtaaggtttttctatgttaaatgtgatcctcagcatttccgcaggatcagtactcggcggcctcggccgctgggtgttgagtaataaattcaacccggtgctggcaatgatgccgctggggacgtatctcgctaatattattgccggttatattatcgggctggcggtggcgtttttctcttctcacccgacacttccggcggaatggcggctgtttattgtcaccggtttctgcggcgcgttatcgacattctcgactttttcactcgagattgtgcaggctttccaggccgggcgcatccaccacggtatggcagaaatcgccctgcatgtactcagctccctgctgatgacctggctcggcctgctgacctggcaggttttgcagcaccggtagaaaaaggggaaattattcccctttttctttctcttccgttttcttccccggcttttcatcttcatttttcagattggcggtcagcagatacagggattgctgccagcggctaggggtcagctgcagcagattgttggcgagcacaaagccgataccgagggcgagaagtaacatcacccgcagcaggttggtggtgttatccacctgggtggattccgtggccagacggtgggtatcgatggtcaggcgcagaaagcctttcgggcctttttttccggggatggcggcgacaatctgatgattaaaataactgccggctttttgtccgtccagcgccagccggtcgcggacagtgatactctcgccgctgccggctatctgtaccccgtcatcctgatatactgtggcatcgagaatacggctgttggtggtcagctgcgctaaatttgccgtaatttgtttcttattgagcactttcccgttatcgtctatagcatcggaaaggttaaacgccacctgttgtgccagcgaataggccagttcattaaactgatccattgacgactgctggtggacgcggctgaaataagacacaccctgtaacagacacaccatcagggcgagacaaatcagaataatggctgttttatgcagccggaatgttaacttcgttttggccattgtttatccgtttttccgttgtcgccaccatattgccagaagcggaaatttttatctgctaccatcatgaatattatcagggattataggagtatctgttgatgtcgacgagtctgacctactgttatttgccgaatgaaatccataagtggccgggccttcctctttccctgagcggtgatgaagtgatgccgctggactaccgggcgggtgacagcggctggctgctgtacggacgcgggctggataaggcgcggatcagcgatttccagcaccgtctgggtgcggcaattgtggtggtctcgtcatggcggattgatgactatcaggtggtgcggattgcgggcagtctgaccgggcgcatcaagcgggtggcggatgagtttcagatggatgtcgtgccgctgggtaatatcccgaaactgcgctcccccggattactgatgatggatatggattccactgcgatccaaatcgaatgtatcgatgaaatcgccagattagccggcgtcggtgatgaagtcgcggaggtgacggaaagagcgatgcagggcgaactggatttcagcgaaagcctgaaagcgcgtgtcggcctgctggccggggcggatgccgccattttacagcaggtgctggatacgctgccgctgatgccggggctgaccagcctggtgcgtaaactccaggcgatggactggcatgtcgcgattgcttccggcggatttactttctacgccaatcatttaaaagattctctgcgcctgattgccgtctatgccaatcagctggaaatcaaagacggcaaactgaccggcaaagtcaaaggtccggtggtggatgccaaatacaaagcgcaggcgctggtgaaactggcggaatttctcaatattcctttagagcagaccgtggcgatcggtgatggtgccaatgacctgaaaatgctgaaaaaagccggtctcggcattgccttccacgccaaaccgaaagtgtatgcacgggcaaaagtggctatccgccatgccgacctgatgggggtgatgtgcaccctcagtggtggtctgaaacacgaagaacgttaatttatcagttattacggggtcacgagtggcaaaaccagcaaaacgcgcctttgtctgtaacgagtgcggggcggattatccccgctggcaggggcagtgcaccgcgtgtcaggcgtggaataccatcacggaagtccggctggcttctgtctcatcgtctgcggcacgcaatgatcgcctcagcggctatgcggggcagagcggtgtcagcaaagtacagaagctgtcggaaatcagtcttgaggaactgccgcgtttctccaccggtttcaaagaatttgaccgtgtgctgggcggcggcgtggtaccgggcagtgccattctgatcggcggtaacccgggcgccgggaaaagtaccctgctgttacagaccatgtgccagctcgccgcacagatgaaaaccctgtatgtcacgggggaggaatccttacagcaggtggcgatgcgggcgcaccgcctcgggctgccgatggacaatctcaatatgctgtcggaaacggcgattgagcagatttgcctgatcgcagagcaggaacagccgaagctgatggtgattgactccatccaggtgatgcacatggcggatattcagtcttcgccgggcagtgtggcacaggtacgcgaaacagctgcctatctgacccgctttgccaaaacccggggtgtggcgatcattatggtcggccacgtcaccaaagacggctctctggcaggaccgaaggtactcgagcactgtattgactgctcggtcatgctcgacggcgaggccgattcccgtttccgcacactgcgcagccataaaaaccgctttggtgcggtgaatgagctgggtgtgtttgccatgacggagcaggggctgcgcgaggtgagcaacccgtccgccattttcctgagccgcggggatgaaatcacgtccggcagttcggtgatggtggtctgggaaggcacacgtccgctgctggtggaaatccaggcgctggtggatcactccatgatgtcgaatccgcgccgtgtggcggtcgggctggagcagaaccggctggctatcctgctggcggtactgcatcgtcacggcggattgcagatgtcggatcaggatgtgttcgtcaacgtggtcggcggggtgaaagtcaccgaaaccagtgcggatctggcgctgctgctctcgctggtctccagtttccgtgaccggccgatcccgcgtgatgtggtgatcttcggtgaagtcgggctggcgggggagatccgtccggtgccgagcggccaggagcggatctcggaagcggccaaacacggttttaaacgggcgattgtgccgaatgccaaccgcccgaaaaacccgccaccgggtatgcaggtgttcggggtgaaaaaactgtcggatgccctgtctgtgctggatgaactggaataagtgaggcagagaatgaccgatttttcctatctgaaacaagccattaaacaggcgggtgtcacactccagcaactggcggatcaatgcggggtgaccaaagggtatctcagccagctgattaacaacaaaatcaaaagtcccggcggccagaagctggccggactgcacagtgcgctggggctcgattacccgctgaagcagaaaattaccggggtggtgttcgggaaattttacccgctgcacaccggccatatttacctgatccagcgggcgtgcagccaggtggatgagctgcatgtgatcctctgtcacgacgaaccgcgtgataaagcgttgtttatcaacagttcgatgtctcagcagccgaccgtcagtgatcgcctgcgctggcttctgcaaacgtttaaatatcagaaaaatatccgcattcactcatttgatgagcacgcttatgatccgtatccgcacggctgggaacactggagtcagggggtgtgtcagtttatgcgggaaaaagggatcacgccggattttatctattcaggcgaaaaagcggatgtgccgcgttaccgtgaatcgttcggcattgaaacagtgcttatcgacccggaacgtacctttatgaatatcagcgggcggcagatccgtcaggcgccgttccgctactgggactacattccgacagaggtcaaacccttctttgtgcgcactgtggcggtgctcggcggggaatccagcggtaaatccaccctcgtcaataaactggcgaatatgttcaataccaccagtgcctgggaatacggacgcgattatgtgttttcccacctgggcggtgatgaaatggcgctgcaatattccgactatgacaaaatcgcgctgggtcatgctcagtatattgattttgcagtaaaatatgccaataaagttgcgtttgtggatacggattttgtcacgacccaggctttctgcaaacggtatgagggtaaagagcatccgtttgtgcaggcactgattgcggagtaccgctttgacctggtgatcctgctggaaaataacacgccgtgggtggctgacggactgcgcagcctcggcagtgacaatgaccgcaaagcgtttcaggatctgctgatcgatatgctgcgggaaaacggcattaagtttgtccatgtgacatcggcggattacgatacccgttttctcgagtgcgtcgagctggttcagcgtctgctgatgctggatacccctgaaattcgtgacggggatcagcaaaaataaagaatgttgtgagaatcgaaaaataatcaggtaatttccgtgagaaattatttttctcttctatactgaaagaacaaggacaacacacagcgtccgacagaattcagggcaacaaagggaggaaagatgaagagtaaaggatccctttactgatggtgttaactgattgatttatttgtcagtttcaagtgttatgaaagcggtaagtatgaagtagtaagtcagcttcggttgtaccttaagtaccaggttcaatgtaatacccgtaacaaaagacactcttttatccatccatccaaccaaaaaatgccgcgcggtccctcaccacgcggcattttccgttatatggcctatttggtcatacgtttgtacttgatgcggtgcggctccagtgcggcctcgccgagagtccgtttcttgtaatcttcatattcactgaagttaccttcgaagaactccactttgccctcatcctgatagtcgatgatatgggtggcgatacggtcaaggaaccagcggtcatgggaaatgaccatggcgcagcccgggaattccagcagggcgttttccagtgcacgcagggtttcgatatccaggtcgttggttggttcatcgagcagcagcatgttgccgccgacctgcagcagtttggccagatgcagacggccgcgctcaccaccggataactcaccgacacgtttgccctggtcaacgcctttgaagttaaagcgtccgacataagcacggctcgggatctcagtggtgccgatacgcatgatatcctgcccgccggacacttcttcccagacggttttcttatcatccatggcatcacggaactgatcaacagacgcgatagtcacggtatcaccgagagtgatagtaccggaatccggctgttctttgccgctgatcatacggaacagggtggatttacccgcgccgttcggcccgataatcccgacaatcgcccctttcggcagcgagaaactcaggttatcgatcagggtacggccatcataggatttggtcaggttttccacttccagaactttgtcacccagacgcgggccaggcggaataaagagttcgttggtctcattacgtttctggtactcgacgctgttcagttcctcaaagcgggccagacgggccttgcctttggattgacgacccttcggattctgacggatccactccagctctttctcgatagacttgcggcgggcagcttcagaagacgcttcctgtgccagacgggcatctttctgctccagccagctggagtagtttccttcccacggaataccttcaccgcggtcaagttcgaggatccagccggcgacgttatcaaggaagtaacggtcgtgggtgattgccacaacggtaccttcgtagtcgtgcaggaagcgttccagccaggcgacagattccgcatccaggtggttggtcggttcgtcgagcagcagcatatccggtttttccagcagcaggcggcagatagccacacggcggcgctcacccccggacagattaccgattttggcatcccaggccggtaaacgcagggcatctgccgcacgttccagctggttatccagattatgaccgtcatgagactggataatcgcttccagctcaccctgctctttggcgagtttgtcaaaatccgcatccggatcggcgtacagcgcgtacacttcatccagacgggtcagggcatttttcacttccgcaaccgcttcttcaaccgcttcacggacagtgtgttccggattcagtttcggttcctgcggcagatagccgatgttcaggccgggctgcggacgtgcttcgccctcaatatcggtatccacacctgccatgatgcgcagcagggttgatttaccggcaccattcaggccgagaacaccgattttggcgcccgggaagaaactcagagagatatctttcagtatatgacgcttcggcggcacaattttgccgacacggtgcatcgaataaacgtattgagccaatgtagtctaccttttttcgttgatggggcatctgcggggcattatgactaagttttacgtttagttaaagccactccggtgtcagtattgcccggttgccggcagtgaccggcgggtacagcagattccccattctaacaccggcctgcgttattctcacggtgatcgtgccgtcgccgggatccgtatcatgatgaacccggggccggtgtgctaacggccgctgtaaccggcctcataagcagcaataatattgtctgtcagcatttttttctgccggtccgtgcggtcactttcatttactttctcagtatgtacttttggtgaaataaactgtgttgtcccggtcatacggctcaaaaattcgttacttctgaaataactaattcgctctttatattgttgcggtgttattccgtcttttttatcttttataccggcatcatagaattgtttaaaaaacggcgtcataagtttaacggagccatttatatgagtctgaaagttagggtcagaatcctgcgcggcctgctggtagacatagtgtcgggtgattttctcataggcggtctgctgtgatgcacatgctgtcagagcaaataatgcagagatgattattatgttttttatattattcataatgtattacgtcctttacggttatcagtaaaccggatgtggtgtaaaaatatgagaatatttttaatggaaaccggaaatacagcaagtgatgtacatcatatattttatgatttctgtctgtaatctggaaaataaaaatacttcaaaaatataactatctgattaattaaaatagcgtgtttatcccggagcaaggggtaaaaaaaagacgaccggagtcgtctgaaatgtgttcactacttatagagttattggtagtgctcaggatcccgcttacggcggtagccggtttcctgaagtgttatcattataattttaaatttaactttactatatagtaagaatgatgagtgcaccagacgatatcactgcatcctgtttaataaaccatcatttacggtaaagggaatgcacaataagaataatcagacatatattctgaataatataatttccggtatctggttatgcggtacaacggtatgatttgtgtctgcgtgacagggcacttacactgtgtatcagggtctgaggtattgtgcagataaacggtaatgaaggagacaggagcagatcatgaggaaatgtatatggccgggcgtggcagccctcagcatgctgatgttttcagcactggcgtcagcggattcactgagtgagcagcgtcagcgctatcaggatgtcaaatctgcctgggatgccaataatatggcggaagtggaacgcctgatgccgtcactgcgggactatccgctctatccttatctggaataccgtgagctgacacaggacatgagcctgctgacagcaggtcaggtgaaaaattttacggatacccatctgaatctgccgtcagcggcaagtctgaaaaataaatttatcagtgagctggccaaacgtaatgactggcaggggctggtcagctacagcacgactgtaccaaaaccggtcagtgcgaagtgtgactattactatgccaactggcagaccggaaaccgtcaggtggcgctggacggggcgaaatcagtctggctggcgggaaattccctgccgtcctcctgcgataagttatttgatgtctgggatcagtccggcggactgacaccggaacgtgttcttgaacgcatcagcctggcgctgaaaaacggcaacacctctctggtcagttatctggcaaaacgcctgcctgcctcttatcagaccatcagcaatggtgtgattaacttacagaaaaacccggcatcggtggtgacatttgcccaattgagcccgacggatttcacccgtcaggccacaatttccgctttctccgcttatgcccgcaaatcaccggatgcggcacgggctgacctgaacagtgtggcgcgcgcccagaaaatgaatgacagcgagcgtcagcaactgaaagatgctgtcgcgtggcagtatatggggagcgacgtgacagatgagcaggctgcctggcgtgatgaggtgattcaggaaaccgattctgtcaccctgcgcgagcgccgtgtgcgtctggcgctgagtaacgcggatgaccgtgatctggatcgctggctgacccggttaccggcggatgctcagcagaaagaggaatggcagtactggcgcgccgtattgctggaaaaaggcggcaataaagcggcagcagatgccattctggaaaaaatcactcagggtcgcgggttctatccgatggtggcggcacagcgtctgggtaaaccgtatatcatgatgatcaatgcggcggataaaccggacaacagcatcagcaatctgccggaaattcagcgtatccgtgagctgctgtactggcagatggaagggctggcccgcaccgagtggctgaatctggtggacagccagacaccggcgcgcaaagcacagctggcgcgttatgcgctggagcagggctgggcggatctgagtgtgcaggcgacgatcaacggcaagctgtgggatcatctggaagagcgcttcccgctggcctggcagagtgagtttgatgagttcactcagaataaaaatatcagcaaaagctatgcgatggcgatagcccgtcaggaaagtgcctggaacccgcaggcgcgttcgccggtcggcgcaacggggctgatgcagctgatgccggcaacggcaacccagacggtccgcgacaatggtattgcggattacagcaatagtgcgcagctggttaatccgcgcaaaaatattgagataggcaccgcgtatctcaacggcgtgtataaccagttcggtcagaaccggatcctggcgagtgccgcgtataacgcaggcccgaaccgtgtgacccgctggctgagcaacagcggcggacggctcgatgcggttgccttcgtggaaactattccgtttgcggaaacccggggttatgtgaagaatgtgctggcgtttgatgtcttttatcagaacttcctgaaagggcagcgcccggcggatgtgctgacaccttccgaacaatcaatgcgttactgatcatccccctccggcccggttcagcagaagacagctgtaccgggcttgtgttatcctaggtgtactagttaacgggtactttttgtactcccgatcctatggggtgacatatgacgacagaccaacttcaggacagcgactggcagcgctttgtcagcctgctgcgcaatgcctattcacaggatattgaatcccacctttttcagctgctttttaccccggatgagcgcacagcgctgggcacacgcgtgcggatcgtcgaggaactgctgcgcggtaagatgagtcagcgtgagctgaaaagtgagctgggggtcggcattgcgaccatcacccgcggctccaacagcctgaaatatgccccggaagaggtgaaagcatggctggagcaggaactcctcagcggcaaaaaataactcagctgttctgccgccggtatgttgtcagagaaatacctgtttcccgtctgaaatagcggcacaggtaggacgggtcatcaaagtgcagtttatctgcgatctgctccactgacagcgtgctgtaacgcaggagtgtcttgatttcagggataacccggcggttgatcagtgacttgggcgagtgattgaaaaacgttccggtcagctgtgacagataaaacggcgtgatatttaaccgccgtgcatagtactgcacatccctgtgttcccggctgtggcggcagataagttcccagaactgccagcacagcgtctctttccggctgtacttctgtatggcggccggggcatccggcggcattctttccgctatccgcaaaaacagattctgtaaatgattacgctgcatgatatgccggtaaaccgggctgttgcgggtgatatcctgcatttgtgccagccacattgtcagcagcgatttttcttccggcagcggaatgcagcggggatattcatgcagaaacagaaacagcgggttcggcaggacataggcgatttcggcagagaaggaggccgggatcagacaaaaaaacacacggaatccccgtgagcgctttttcagcagcgcgatcgtatcttccgccagcaccagaatatcccccgcccgtacaggctgagatttaaagttcagtgacatatgcgcgtatcccgcccggcagatcatcagggtgagatacgcatttccgaaggtcagcggtacgccgttgtgatcggccagtgtgctttcccctgtcagtaatgtgtctgtttcttccgtcagcaccggaatctgatctgtcagtgtaatatcgtgagttgccatttttgccgtcctgaagcagatatcagaggaaatttatcacaatagttttcaaaagtaccgaaagtgcggaggtttgttgcttaccgccggtctgccgtcaggctacacttcccgtcatcacagagagagccgctgaggctgaatgtataactgaagtaaggtaagcagtatgaaattagaaacagaacgtatgattctgcgcccgtgggcagaaaccgatgccgccgatttatatgaagtggcgaaagatgaccgcgtcggcccgattgccggctggccgccgcacagttgcgctgaggaaagtgccgatattatccgcaccgtttttaaccttgatgaggtctatgccactgaactgaaagcgaacggacgggctgtgggctgtatcgggatcctgatcggtgaaaacagcaactttgacatcagtcagcgggaaggggaaatcgcctactggattggtgtgccgtaccagggacagggtctgatcccggaagcggtcagggaagtgatgcgccatgcatttgaaacactggagctggatgcactgtggtgcggctattttgaaaacaatgaacagtcacaccgcgcccaggccaaatgcggattccgtcatcatcataccgaagagaataaattcaatcagttcctgaatgattaccggactgaacatatcagccgcattacgcgggaagagtggctggcacagcagtaaatgtgccgggaaggtcaccgggccggtgagtaccggtccggtttttcagatcaggattctttggtgttcagggatttataaatttcatgctggataggcaccagcgccaggataattgcctgctcatagacactggtgcgggtcagcgcgccgccggtgaagaaaccgatcgctccgcctttctgtttgatatcttccaccccggtcaggtcggccatttcatcacccagttcgcggccttcgcggatccccgcgagaattttttccggcagcatcaggctggcagaacgggattccccgcgcagctgacggtgctcgataacaatccaggcaaaggtcatatcgccttcaatacccgcctcaacaccaacccaaaaatccgcttccggtctgacctgacgggccgcattgacgcgctggcgggcaccggtacgggtttctgtgttcccgataggctgctgcggcacactgctgtccacattgacatcttcaatatcaaaattgccgttacccagtaccacttcaaaagcggaacggatagcctgaattttggccggattagtcgttgctgcgataatatgaaacatgataattaaactatccacgtaattatgtttgccgcagtatagcgaatattgacggctttccgcagatttttttagacggtgccgtgcggtgaaagagtttcagggataaagcgtgatcccgggaatgtttttacggtatggtagcggggtaatcagactttcacacagtaaaagcagagattgatagttatgtcacaggtatttcttgtccgtcacggcgaaactgaatggaacgttcagcgccgtatccagggtcattctgacagcccgttaacacaaagtggtatcgatcaggcgaagcaggttgccgcgcgtctgaaaaatgaagggatcacccatattattgccagtgatctgggccgcacacagcagaccgcgaaactgatcgcagaagcctgcggttgtgagattattgcggatccgcgtctgcgtgagctcaatatgggcgtgctggaaaaacgtcagatccataccctgaccgcagaagaagagggctggcgtaaaagtctgcttaacggcgcggaagacgggcgtatcccggaaggggaatctctcgcggagctggaaagccggatgcgggcggcgctggagagcacgctggatctgccggagggcagcaaagttctgctggtcagtcacggtattgcgctgggatgcctgattggctctgtgctggggctgccggcgtatgcggagcgccgtctgcgtctgcgcaactgttcgttatccgttctggagtatcaggaaagcccgtggctggcggatggctgggtagttgaaacggccggtgacaccacacatctgagtcttccggcgctggatgaagtgcagcgctgagtaaaccggtgaatcagacaccgcccgggtgaacaagacaccaccggcggcggtgtttgttctgcgggaaggctgttactgcgcgtcacgtctgacaggaatgtagtatttaaattcctcgatgtgatggcgcggatcagtctcatccacatcagccgcatccggatagcggatgtcggttccctttctcagtttatagctctcaatatcgtaaccacggcggcgggtgatccccagtcgcggcacacactggccgtaaatcgtgaacaggaattcctgcatcgcaccgcggtaaggaatgccgctgaaggtgaagcagagatattcgccaccgggcatttccacctcgtgaacattttcctcagtggtaaaggcagcaaattccttcgccacggcagtggtgtaatggactgtctgctcatcttctttgtccggattacgggtagtgctgtaaagcccgtaaacatagtccgggatagttttcgccacagaaatatgatgcagccagaactcctggcgcatgtgggtacacgcggttgcccagtcttccagacgatgtgaacagctgttctctataccggtgactgtgcgcggcggcagcgtgacaaactcgtgctccggcatcggcacatcatcaagcagaatggcggagcagattccgtcagagcaccattcgtcaagacggcggtacagcgcaggtgttttattaaactgtttcttgaatgcgcgggtaaaggtttgctgtgaatcgaaacgatactgtaatgcgatatctaaaataggacgggcagtcagccgcagtgcaatggctgcgcgtgacaaacggcgggcgcggatgtaagcgccgatggcctcaccggtaacgtccttgaacatacgttgtaaatgccacttggagtagcctgccttcgcagcgacgttatcgagggaaagtggctgatctaaatgctcatctaaccaacggagtaaatcgcgaatgatgctggtctgatccatacatctcccttattggattgatgaagttctgaaagagatataacgaatttatattctaacctgagtgattatcaacgggataatcatttaccaattcttacttttggccggaaaaaatgttttaagaacagggcgactatcataaactggtaacatggattatctttaaaatcatacaattttcaaatgattttcttgggctattaagattatgaatcagactcgccggtctatactgggaattatcacagctatttcattgagttcgttatcctttttgagccatggtgaagaaatcggctctgtggacaccgtgttcaaaattctggggccggaccacaagattgtggtggaagcctttgatgatccggatgtggaaaatatcacctgttacctgagccgggcaaaaaccggcgggatctcgggtgggctgggtctggcggaggatacatctgatgccgcgatttcctgtcagcaggtcgggccggtcacagtcagtgataaagtgaaaaaaggccgcaaagataaaggccaggtggtgttccagaagcggacatccatggtattcaagaagttacaggtggttcgtttctatgatgagaagcgtcacgcgctgatttatctgacctattcggataaagtggtcgacggctcgccgaagaatgcgctgagcgcggtgccgatcattccgtggaacaaataaccggataacagcaacaacaaatccccggtggtgccaggcatcaccggggatttcgtatatatgttaccgcagcggaagattactcttcgagatcgccgcagaaccggtaaccttcgccgtgaatggtggcgatgatttccggagtatccggtgtggactcgaaatgcttgcggatacgccggatggtgacatccactgtacggtcatgcggtttcagttcacggccggtcattttcttcagcagttcagcgcgggtctgaatcttgcccggattctcacagaagtgcagcattgcacggaactcactgcgcggcagcttgtactgctcgccggttggtccgattaatgagcggctgttgatatccagttcccagccgttgaacttgtaactttccacactgcggcgctcttcgctgccaccggccagattcatggtccgtgacagtaagttgcgtgcgcggatagtcagttcacgcgggttaaacggcttggtgatgtagtcatcagcaccgatttccagaccgaggattttatccacttcattatcacggccggttaagaacatcagtgccacgtttgcctgttcgcggagctcacgcgccagcaacagaccattttttcccgggaggttgatgtccatgataaccaaattgatatcatggtctgacagcacattgtgcatctctgcaccgtcagtggcttcatgtaccacgtaaccctctgcttcaaaaatacttttcagggtgttacgggtgacgatctcatcttcaacaattaaaatatgcggggtttgcatagtcgctacctaaattacttagaataataagaaatctgattatctgcccgtgtaacctgtgccggtatcgttgtggttatgtccggcacatcaccacagacagaaaaaaatcttgttcagaccgcattttaacaatcactcaactcagaacgtaaggaattgaaacgattcgtaccaatattagtctattaacaccaatataacagcaacccaatcatttaccatccggaaatctaacctttgttgatacatatcaaaatcaattgtagcacgttaacacaattttcaattgttaattgccggttttaatgattgtcaaataaatagaaatacaatgttaagcattatatctgacttgtctgattattgtacatttttctgccgggtaaacagcgaaaaacgcaacctgcatgataaaagtgaaaaaatacagaaactcctggttctgtaaaattaaatgccggttgatgagatgataaccgcgttaatttgccgtaatttctttttattctgatatgtgatcagattcaaattgtctgattctgcgggcaaatctgaagaataatttgacatcaacctgcctttcctttaaccgtaatagggttaaccagacaaatgacagacaggaaccccatgcgtaatcacagcctgaccatgattattattaccaccaccaccattaccaccggcggtgcgggctgacgcatatctgaaatcacgaaaaaagcccgcacaatgactgtgcgggctttttttttggactaaaaacggcaggagcaggtgacacatgcgtgtacttaaatttggcggcacatccgtggcaaacgcggatcgtatactgaacatcgcaggaatcgcggagaaaaaactcgcgcagggacagctcgccatggtgctttccgcaccggcgaaaatcactaattacttagtggcgatggtggagcagaccgtcagcgggcaggaagcaaacaccctggtacacgatgccgccgcgattctcggggcgattctggacgggctgcgcgatgcggtaccgggctttgaatatgaccggctgaagcatgaaacagagcaggaaatcagccggatccgccgggtactgcacggtgtgtcactgctggggcagtgtccggacggcatcaacgccaatatgatcagctgcggcgagcgtttttccattgcggtgatggcatcactgctgaaagcccgcggccataaagtgacagtgattgacccggtggccagtctgctggcgtttggtggttatctggaatccaccgttgatattaatgaatcaacaaaacgtattgcagcgctgaatattccgtctgaccacatcattctgatggcgggattcaccgccggtaatgaaaacggtgagctggtggtgctggggcgtaacggttctgactattctgcggcggtactggcagcgtgtctgcgtgcctcctgctgtgagatctggactgacgtggacggcgtgtatacctgtgacccgcgtttggtgccggatgcccgtctgctgaaaggcatgtcgtatcaggaggcgatggaactctcctatttcggggcaaaagtcctgcacccgcgtactatcgcgccgattgcccagtttcagatcccgtgtctgattaaaaacaccctcaatccggacgcgccgggcacgctgatcggcgacggccagcgtgatgacagcctgccggtgaaagggatcaccaatctgaataatatggcgatgttcaacgtctccggcccgggcatgaaagggatggtcgggatggcggcgcgggtgtttacggtgatgtcacggcgtaatatctctgtcgtgctgattacacagtcatcttccgaatacagcatcagtttttgtgtggcgcagaaagataaggcccgcactcagcaggcactggaagaagagttctatctggagctgaaagagggcgtgctcgacccgctggatgtgctggataacctggcgattgtctccgtggtcggggacggtatgcggacactcaaaggcatttccgcgcggttcttctcggcactgacgcgcgccaacatcaatattatcgcgatcgcgcagggctcatccgaacgttccatttctgcggtggtggataatgatctcgcggccaccggtgtgcgtctgtgtcaccagatgctgtttaacactgaccgcattgtggaggtgtttgtggtgggtaccggcggggtcggcagtgcgctgctggagcaaatccgccgccagcaggcgtggctgaaagcccggagtatcgatctgcgcgtgtgcggtatcgccaactcaaaagcgatgctgactaatatgcgcggcattgatttacaggactggcgtcagtcgctggcgcaggccaaagagccgttcagcctcagccgtctgatccgcctggaaaaagaatatcacttccttaatccggtgattgtggactgtacgtcgaatgaggaaatcgccctgcaatatgcggatttcctgaaggacggtttcaacgtggtgacgccgaacaaaaaagccaacaccctgtcgatggattattaccatgaactgcgcagtgcggcggcggcatcaaaacgtcagttccgttatgacaccaacgtcggtgccggactgccggtgatcgaaaacctgcaaaacctgctcaatgcgggggatgaactggtgcagttcagcggtattctgtccggttcgctctcctttattttcggtatgctggatgaagggatgtcgctgtctgaggcaacagctgcggcgaaagccaaaggctttaccgagccggatccgcgtgatgatctctccgggatggatgtggcgcgtaagctgctgatcctggcccgtgaagcggggctttcccttgaattatccgatattgaggtggattccgtgctgccgccggatttcgatgcttccggcgatgtgaatacctttatggcgaatctgccgtcactggatgcggcctttgccgcgcgtgtggcgaaagccgcagaagcaggccgcgttttgcgttatgttggcatcattgatcacggccgctgtcaggtgaaaatcacagaggcagacggtaacgatccgctgtataaagtgaaaaacggcgagaacgccctggcgttttatacccgctactatcagcctatcccgctggtactgcgcggttacggcgcggggaatgatgtgacagcggcaggggtgtttgcggatgtgctgcggacaatgtcatggaaactgggagtgtaaaacgtgataaaaatttatgcaccggcgtcaatcgggaatgtgagtgtggggtttgatgtgctgggtgcggcagtgtctccggtcagcggggcactgctcggcgactgtgtgtccatcgcgaaggcagagacgttttcactcagaaaccgcgggcgttttgccgggaaactgccggtgaatccgaagcacaatattgtgtatcagtgccgtgaacggttcagtgagatcattcatgatgatctgccggtcgccatggtgctggaaaaaaatatgccggtgggctcggggctgggctccagcgcctgctcggtggtggctgcgctggtggcgctgaatgagtacaccggcaggccgctggatgaaatgacgctgctgcgcctgatgggggagatggaagggcgcatctccggcagtgtgcattatgacaatgtcgccccctgcttccttggcggattgcagctcaatattgaaaccggcgacagcgtcagccaggcagtacctgggtttgaacactggtactgggtaatggcgtatccgggcatcaaagtctccacggcgcaggcacgggcgattttaccggcgacctactcacgggcggatattgtcagccacggccgcaacctggccggattcatccacgcctgtcacaccggacaggctgacctggcggcggcgatgatccgtgatgtggtggcagagccgtaccgccgtgaattattaccgaattttgatgcggtccgtgagcaggtgcttgcacgcggcgcgaaggcatgcggcatctccggctcgggtccgaccctgtttgcggtctgtgacagcaaatcagcggcagatcaggtggcggatgtctttaacacacagtatttgcagaacagcgaagggtttgtccatctgtgccgtctcgatctcaaaggcgcacgtcagataagtgcataaaggtaaaaaatggaactgtacaatttaaaagatgagagtgaaaaagtcagttttgcacaggcggtaaaacaggggctgggacgcggacaggggctgttcttcccgcgtgagattccgttttttgagcaggcggaaatggataagctgctggcgatggattttgtcagccgcagcaccgccattctgcatgccctgattggtgatgagctcccggaagctgagctggcagcgcgtgtccgtgccgcctttgccttcccggcaccgctgaacccggtggagccggatgtggcctgtctggagttgtttcacggcccgaccctggcattcaaagatttcggcggacgttttatggcacaggcgctggccgcggttgccggtgacaaacccgtcactattctgaccgcgacttccggggataccggtgctgccgtcgcacacgccttttacggcctgaaaaatgtgcaggtggtgatcctctatccgcagggaaaaatcagtccgttacaggaaaaactgttctgtaccctcggcggtaatattcacaccgtggcggtgcaggatgatttcgatgcctgtcaggcgctggtgaaacaggcatttgacgatgaggaactgaagcagacgctgcatctgaactcggcaaactctattaatatcagccgtctgctggcacaaatctgttattactttgaagcggtggcacaggttccggcggaaaaacgcggtgaactggtgttctcggtgccgagcggcaacttcggtgacctgaccgccggggtgctggcgaaagcgatggggctgccggtgaaacgctttatcgccgcgaccaatgccaacgacacggtaccgcgctatctggcggacggacagtggaaaccggcggcgacggtggcaacgttatccaatgccatggatgtcagccagccgaataactggccgcgtattgaggcgctgtttgcgcgcgaaggctggtctctgaaggatctgcgttccggtgcggtaagtgatgacgaaacccgcgaaacgatgcgcgatctggctgcgaaaggttatatttccgagccgcatgccgcgattgcttatcgccagctgcgcagtgacttgcagcccggtgagtacggtattttcctcggcacggcgcatccggcaaaattcctggagagtgtggaagcgattctgggcagtaaactgccgttaccggctgaactggcggagcgggctgatttaccactgctgtcagccgtgttaccagcggatttcgcggcgctgcgggactatatgctgaagacggtgaagccgtaatttcttatcaatcagcgatagcgagatgataacgggtaagagaacaaaaagcatactgcgccatggatggcgcagctgaattatccggcggttatgctgcgtggtgttctgaacgtgtaaacaccagttcccgctcaccggactgactctcatcaaaacggtaaccgtcgaggttaaagccggtcagctgagacggctgtgtcaggcggttctgaataataaaccggctcatcaggccgcgtgctttcttagcatagaaactgatcactttatatttgccgtttttctcatcgaggaaaaccggtttgataatcaccgcattcagtttctccggcttcaccgctttaaagtattcatcagaggccagattgaccagtacattatcaccctgtgcggccagtgcctgattgagattgtccgtaataatatccccccagaacgcatacagatctttgccgcgcggattggcgagtttcgtccccatctccagacggtaaggctgcatcagatccagcgggcgcagcacgccgtacaggccggaaagcatacgcagatgctgctgggcgaaatcaaaatcggcttcactgaaggtttccgcctgcatcccggtatacacatcccctttaaatgccagaatagcctgacgggcattgtccggcgtgaaatccggctgccactccccgaaacgggcggcattcagacccgccagtttatcactgatatgcatcagcgagccgatatccgccggggtcagtttgcggcaggtttccatcagggcttctgattgtgccagcagctcaggctgagtatggcgttcagtggctaacgggctgtcatagtcgagggttttggcaggggaaatagtcagcagcatggtcggctccggtctgatattgtcattattaacggtactctaccaaaaaaaagcacagagcgggcaaatcactgtaatcggtaatacatacaaaacaggaggcgttccggattacagcggaataacggcggatcaccggtgcggcaccggattttccctgcttgcgcggcgggctgtccgtgatattatcaggtgcagttgcggcatattgccatctgtactcgccatacttcagaatgccggggtgttgactacgcaaagcccgcctgcaggcatgctggattattcagagtatcttctgacataagatgagagacgaaaatgaccgataagttaacttccctgcgtaatctgaccacggttgtggccgataccggtgacatcgaagcgatgaagctttacaaaccacaggatgccaccaccaacccttctctgatcctcaatgcggcgcagattccggagtaccgtaagttaattgatgatgcggtgacctgggcgcgtgcacagagcgattcacgtgaacagcagattatcgatgccggtgacaaactggcggtgaatatcggtctggagatcctgaaactgattccgggtcgcatttccacagaagtggatgcccgtctctcttatgacactcaggcgagtatcgcgaaagcaaaacgtctcatcaaactgtataacgatgccggcatcagcaacgatcgtatcctgatcaaactggcttccacctggcagggtatccgcgcggcggaacagctggaaaaagaaggcatcaactgtaacctgacactgctgttctcctttgctcaggcgcgtgcctgtgcggaagcaggtgtatatctgatttctccgttcgttggccgtatcctcgactggtacaaagcaaacagtgacaagaaagagttcgcaccggcagaagatccgggcgtgatttcagtgactgaaatctacaactactacaaagagcacggctacaaaaccgtggttatgggcgcaagcttccgtaactcaggtgaaatcctggaactggccggttgtgaccgcctgactatcgcccctgcactgctgaaagagctgtcagaagcgaccggtgcggttgaacgcaaactggaatacaaaggcgaagtgaaagcgcgtcctgcaccgctgacagaagctgagttctactggggccaccacagtgacgctatggcaaccgagaaactggcggacggtatccgtaagtttgcggtagaccagggcaaactggaaaaaatgatcgccgatctgctgtaatcgttataatacagtcagatataaaaggcagccggcaggctgccttttttgtttccggcggcaatgctatgctgtgccccggagtcaaaatgacgttgaggtgactatgaacaatgtgttgcgcatcggtcttgtctcggtttctgaccgcgcatccggtggtatttatgaagataaaggcattccggccttacaggcatggctggaaaaaactatcaccacgccttttcagacagaaacccgcctgatcccggatgaagaagcgatgatcagccagacgctgtgtgagctggtggatgaattcggctgccatctggtgctgacaaccggcggaaccggcccggcgcggcgtgatgtgactccggacgcaacactggcggtggcggatcgcgaaatgccgggtttcggcgagcagatgcgtcagatcagcctgaaatttgtgccgacggcaatcttatcccgccaggtgggcgtgatccgcaatcagtcactgatcctcaatctgccggggcagccgaaagctatcgctgagaccctggaagggctgaaagatgaaaacggcaaagtaatggtttccggtatttttgcaagtgtaccgtattgtatacagttgctcgacgggccttacatcgaaactgaccctgaaattgtcgcggcgtttcgccctaaatcagcaataaagccgcagtaatgctgcgttttcagcataaaataaaaaacattcccccggacacctttcttgtcctatgatgcggttatccacttatgtaaagtaaagataacagcaatgtaaagacaggaaaggtgaacccatggcacagaccattccccggacactcaaccggcaggactataaaacactctctctcgcggctctgggcggcgcactcgaattctacgattttattattttcatcttttttgccgtcactatcggcaaactgtttttcccgcctgacatccctgcgtggctggtgcagatgcagactttcgggatctttgctgccggttatctggtacgcccgctgggcggtattgtgatggcacacttcggtgacctggtcgggcgcaagaaaatgttttccctcagtattctgctgatggcggtgccgacactctgtatcggcctgctgccgacttatgaatctatcggcattgccgcgccgttactgcttttattaatgcgggtaatgcagggggcggctatcggcggggaagtgcctggtgcctgggtatttgtctccgagcatgtgccgaagcatcgtatcggcattgcctgcggcacactgacagcagggctgacggttggtatcctgctcggctcgctggtggccatgatgatggcgacactctttactgaagcgcagcagcttgcctggggctggcgtgtgccgttcttcctcggggggattttcgggtttgtggcactgtatctgcgccgctggctggcggaaacgccaatctttcaggagatgaaacagcaaaaagcactggcgaaagagttgccgctgaaaaccgtggtggtgaatcacaaagaagcgattgtgatctccatgctgctgacctggctgctctccgccggggttgtggtggtgatcctgctgacaccggcgtatttgcagacagagttcggcctggcaaaagcggtggtttcagtcgccaatatgaccgcgattctggcgctgtgcgcggggtgtctggtggcgggttatctgtgtgacaaactgggcgcctctgtggtctttaccttcggcagcctgctgctggcggtctgcaccggctatttttacctgaccgccggtgagccgggtacgccgctgtcgctgacctacggactggccggattcagtgtcggcgtggtgggcgcggtaccgtttgtgatggtgaacagttatccggcggagatccgcttcagcggtatttcgttctcctacaacctttcttatgccattttcggcggactgacgccggtggtggtcacgctgttcctgaaatggaccccgctggcaccggcgtattacatgctggggctttcactgatcggcctgctgctgggactgtatatggggaaagcggcggtgcgtcagcggatgatggtgttcagctcctgataaccccctgcattgtgttgtgtgaatgccgtgctgatatgactgtcagcgcggcatttttcagtgtttcatcattttcttttaaataatctgtttttttttcattttccccttgatgaatgcatttatggccccatctacttgtcatcggaaactgaaactcagttgaatcccctttaacgctgcggatgtccggtaccgtcaggaaatattccgggtgacgggtgagcgaaaaattttttcttgaaaagtgaaaattgaacctcatatacatcggtagcgtaagacgaacagaattattcggaggcctttagatgggtaaaattattggtatcgacttaggtacaaccaactcttgtgttgctgtaatggatggtaatcaggcacgtgtcctggagaacgcagaaggcgaccgcacaacgccgtcaatcattgcgtatacacaggatggtgaaatcctggtcggtcagccggcaaaacgtcaggctgttaccaacccgcagaacacactgtttgcaatcaaacgtctgattggtcgtcgttttgacgatgaagaagtgcgccgcgatatgaacatcatgccgtacaaaattgtcagctctgataacggcgacgcatgggtggaagcaaaaggccagaaaatggcaccaccacaggtttctgctgaagtcctgaaaaaaatgaagaaaaccgctgaagattatctcggcgagccggtaaccgaagcggttatcaccgtacctgcttactttaacgatgctcagcgtcaggcaaccaaagacgccggccgtatcgcaggtctggatgtaaaacgtattatcaacgaaccgactgcagcggcactggcttacggcctggatcgcgaagtgggtaaccgtactatcgcggtcttcgacctcggtggtggtactttcgatatctccatcatcgaaatcgatgaagttgacggcgaaaaaacctatgaagtgctggcaacgaacggcgacacccacttaggtggtgaagacttcgacagccgcatgatcaactatctggttgaagaatttaagaaagaacagggtatcgatctgcgtaacgacccgctggcaatgcagcgtctgaaagaagctgccgagaaagcgaaaattgagctttcttctgcacagcagactgacgttaacctgccgtacatcacggcggacgcgaccggtcctaaacatatgaacatcaaagtgacccgtgcgaaactggaatcactggttgaagatctggttaaacgctctatggatccggttaaagttgcattacaggatgccggtctgtcagtgaatgatatcaatgatgtcatcctggtaggtggtcagacccgtatgccgctggttcagaaaaccgttgctgatttcttcggtaaagagccgcgtaaagatgtgaacccggacgaagctgtggctgttggtgctgcggttcagggcggtgtgttaggtggtgatgttaaagacgtgctgctgctggacgttaccccgctgtctctgggtatcgaaaccatgggcggcgtgatgactccgctaattgcgaagaacaccactatcccgaccaaacacagccaggtgttctccacagcggaagacaaccagtctgcggtaactatccatgttctgcagggtgagcgtaaacgttccggtgacaacaaatcactgggtcagtttaacctggatggtattcaggctgctccgcgcggtatgccgcagatcgaagttacttttgacatcgatgccgacggtatcctgcatgtgtccgcgaaagacaaaaacagcggccgtgagcagaacatcaccatcaaggcatcttccggtctgaacgaggaagagatccagaaaatggtacgtgatgcggaagccaacgctgaagctgaccgtaagttcgaagagctggtacaggtccgtaaccaggcagatcagctggttcacgctacccgtaaacagatcgaagaagcgggcgacaaactgccgggcgacgataaagtgaaaatcgagcaggcggtgagtgagctggaaatcgcagcgaaaggcgaagataaagccgctatcgaagagaaaacgaaagcgctgatcgacgcttctgccaaactgatggaaattgcccagcagcaggcgcaggcaggtacagcaggtgctgatgccgcgcaggatgcaggtaaaaatgatgatgttgtcgatgctgaatttgaagaagttgacgacagcaaagacaaaaaataaggcccttagcgggcgcggtgatgactgttattaatcactgaaaaccggcacgggcgttgaggaaactctgcgcccgtgtgcttgtgttaagggacaaaacggatggcaaaaaaagattactacgaggtgttgggcgtctcgaaatctgcggatgacaaagagattaaaaaagcctacaaacgccttgcgatgaaatatcaccctgaccgtaatcagggcgataaagacgcggaagataaattcaaagaagtaaaagaagcatacgagatcctcaccgacgcacagaaacgtgcggcttatgaccagtacggccacgcggcatttgagcagggcggtatgggcggtggcggcggatttggcggcggcggtttcggcggtgctgatttcggtgatatctttggtgacgtcttcggtgatatttttggtggtggtcgccgtcagcaacgcgcggcacgcggagcagacctgcgttacaacatcgaactgacccttgaagaagcggttcgtggtgtgaccaaagagatccgtattccgaccctggaaacctgtgataaatgtcacggcagcggggcgaaagaaggtacagagccgcaggagtgtccgacctgtcacggtatgggccaggtgcagatgcgccagggcttctttgcagtgcagcaggcgtgtccgacctgtcacggccgcggcaaaatcatcaaagatccgtgcagcaaatgtcatggtcacgggcgtgttgaacgctataagaccctgtcagtcaaaatccctgcggggatggacagcggtgaccgtatccgtctgaccggcgaaggtgaagcaggcgaaatgggggctccggcaggcgatctgtatgtcgaggttcatgtccgccagcacaatatcttcgagcgtgacggcagcaatctctactgtgaagtgccgattggctttacggttgcggcgctgggcggtgaaattgaagtaccgacactggacgggcgcgttaagctgaaaatcccggcagaaacccagaccggcaagctgttccgcatgaaaggcaaaggtgtcagaccggcgcgcggcggaatgcagggtgacctgatgtgccgtgtggtggtggaaaccccggtgaaactgagcgaaaaacagaaagaactgttacgtgagttcggtgaatctgtggatggccagagcggtcacaacaacaccccgaaagcaaaacgcttctttgacggtgtgaaaaaattctttgatgacctgaccaaataagccattgtcagatatgtatataaccggccgggataattttcccggccggtttttttgtgtgttttgtaaaagttgttttatctgaacgcgttattgtttttgctctgattatcaacagggattaacgcgatgaatactatcggatccgccattattcacgccggactggttgcagttcagccttcagtatctaccggacacagcgccggtgttgcgaaaagcatacccgtgacacaggtctgcaatacccgggccgagtttgcccggcaggagatgactgcacctgacgcggtaaaagtgaatgtgaagtcaggtgaaataaatctgctgatgctgaacacgctgtataacatcagggctgaaactatccccccatcttcgtcacaatcaccccggccacaataatacaggcggccagaatccgggcgggagtcagcttttctttcaggaaatacgcggagagcagcagtgcgaacagcacactggtctcccgtaacgctgcgacaatcattatcggcgcctgtcccatggcccatatcacaatgccgtagctgaagatttgcagaataccgccggtcagcccgggcttgctgtaacgcagaaagtcacgggtgaaatggtggcggtaacgggcaaaacccatcaccaccatcaccagtccgttcagggcgaacaaccagaaaatataagtcagtgagtctgtgctgctgcgggcaccgaagccgtcggagagtgtgtaacaggcggtaaaaaaggcggtgatcaccgcatagatcagcccgctgcgggcgtgcccggaggctccgtgtttcagcgcgggaaggataaccccggtgatgatcagcagaataccggctaaagagagccacggcaggtgctcaccaaacagaagtaccgcaaacagggtcgtcagcagcggggcacaaccccgggaaaccgggtaaatctggctgagatcgccctttgaatacgctttactcagacaaatggcataaccgatgtgaaagagggcagacagcagcagccactttaccgctgctgcatccggtaagccgagccaaaacagggcgggaacagagaccacgccggaccagatggtcatcaccgcgatacccagaaagcgatcctgtccgaatttaatcaccgcattccaggatgcatggaagaaggcagcaaacagtacagcaataaacagcgtggcggacatgggataacctgttttattcagtgagcggtggcaacggcaacagaatatccgccggtatgagggatcatacgatacacttcacagaaactaaaatgttaatatatagttaatttcagagtgtttatcaggaaattctgtgattaaaacccttattgatcaggaattatcgagttattattgctgaataatctgcttttttcgagttaattgtttgcatattattaacgccgacagtcttaaaggagttaacccatgaccgcaattatccgacagttcttaaaactcgaagccgcaggcggcatactgctgattatcgccgcgctgatcgcgctggtaatggcgaatacgccgttgtcggcgttgtatcagtcgtttcttgatattcctgttgctgtaaaatttgcggcactggaaattgataagcccttgttattatggattaatgacgctctgatggcgatatttttcctggtcgtcgggcttgaagtaaaaagggagctgatgaccggctctctggccgggcgcgacaaagcgatgtttccggcaattgccgcactcggcggtatgatagccccggcgctggtctatctgctgtttaacggcggggatgccgctgctgcacagggctgggcgattccggccgcaaccgatattgcctttgccctcggcgtaatggcactgctgggtaaaagagtaccgacagagctgaaagtctttctgctggcactggcgattattgatgacctcggggttatcgtgattatcgcgctgttttacaccaaaaccgtttcactgacagcgctgctgctggcggcactgatggtggtggtattgtgtgtgatgaactggcgtaatgtcagcaacaccgctgcgtatatgattgcggggctgatattgtgggtgtgtattctgaaatccggcgtgcacgcaactctggccggagtgatcgtcgggttcctgatcccgctgcgcagtaaagatggtgagcactcaccgtcagaggagctggagcatgtgctgcatccgtgggtggcgtttctgatcctgccgctgtttgcctttgccaatgccggtgtcagtgttcagggaatttcctttgatgcactgatgggcacactgccgctggggatcctgctcggtctgtttgtcggtaaaccgctggggattttcaccgcatgtctgatttcggtaaaactgggctttgcaaaactgccggagaggattactcttaaccagatattcgctgtatcggtgttatgcgggatcggttttacaatgtctatctttatcgcgggactggcatttaccgggcttccggaagcatttaacacctactccaagctgggaattctgattggttccaccatggcggcagttaccgggttgttcctgctccattccgtgttaccgaagaaaacagtccggcagtaatccgttattcaccggcctccgcggccggtgaatacaacagaatttccgagttaatcatcaaaaaaagataaggtatgtaccgggaaaaactatgcgagtctcccatttaaactacaatcacctctattatttctggcacgtctgcaaagaaggttcggtggtgggggcggcagaagcgctctatctcaccccgcaaaccattaccggccaaatcaaggcgctggaagagcgtctggacggtaagctgttcaaacgtcagggacgcggcctggtgccgtcagagctgggtcagctggtgttccgctatgcggacaaaatgtttatgctgagccaggaaatgctggatattgtcacttacagccgcgaatccaatctgttgtttgatgtcggggttgcggacgcactgtcaaaacgtctggtcagcaaagtgctggaaacggcggtgatggagcatgagcaaatccatctgcgctgttttgaatccactcacgaaatgctgctggagcagctcagccagcacaaactggatatgatcctctctgactgcccggtggattccacccagcaggaagggctgttttccgtgaagctcggggaatgcagtatgagtttctactgccgccagcccgcgccgcagaagccgttcccggaatgcctggaagagcgccgccttctggtgcccggccgccgctcgatgctcggccgtcagttgctgacctggatccgcaataaaaacctggaggtggaaatcctgggtgaatttgatgatgcggcactgatgaaagcatttggtatgtatcacaatgcgatttttgtggcgccgtcgctctacaccaaaggcatttttgcggacagtgatgttgtcgagctgggaacagtggataccatcaaagaagagtattatgtgatttttgccgagcgtatgatccagcatccggcggttcagcgggtgtgtaacaaggatttctctgcgttgttcagcggttcgcagtcggctgcggatgccggtttaccggactgaggcagaaaaaggacataaaaaaaccggcatcagccggtttttttatgtctgcacaatcagattacattgctttgatctgagcagccaggttcgccttatgacgggcagccttgttcttatggatcaggcctttagcagcgtgacgatccacaagtggttgcatgtcattaaatgcgttctgagcagcttctttgtcgccggcagcgatagcagcgtaaaccttcttgataaaggtgcgcaccatagaacgacggctagcgttatgctgacgacgtttttcagactgaatggcgcgtttcttagctgatttgatattagccaaggtccaactcccaaatatattcttcgaggacaatacaaaggtggaggaatatgcctgctccgctttattttgtcaatggatttgtgcaaatatgcgtcgttgtacagcgacgcaaatgtacgttgtgatgggcggggattttatcagtttacgcagcgggaatacagcccttacacggaaaaaagtcaccggaatggtaagattctgacgaaaaaaattatttttcactttccgcagagggggatgccccgctttttgtacagagaattcgcgattcagccgcattagtgggttaacctgacgcggcggacaaggtataatcggactaattttgactgtattgagccggctatggagctaattcgcggtactcacaatattcgtgcgcgtcaccatggttgcgtgctgactatcggtaattttgatggcgttcatcgcggacatcaggcattactgtcacatctggcgcaggaaggaaaacgcctggggctgccgtcggtcgtcatgatcttcgagccgcagccgctggaattttttgccccggataaagcgccggcacgcctgacccggctgcgcgataaggtaaaatatcttgcgcagtacggtgtggactacttattgtgtgttaaattcagcaaacaatttgcatcactgacaccggatgcctttatctcacacctgctggttgaacagctcggggtgaaatttctggtggtcggggatgattttcgtttcggaaaaaatcgtcagggcgattttaacgggctgtgtgaggcagggaaacagtatggtttcacggtccgcagcacggaaagtttttgtgataacggcaaacggatcagcagcacggccatccgccgtgcgctggaaaatgacgatctggcactggctgaggcactgctcgggcacccttaccgcatcagcgggcgcgtggtgcacggcaacgaactcgggcgcacgatcggtttcccgactgccaatatccccctgaaacgtctggccgcaccggtaaacggtgtgtacgctgtggacgtatacggcctcgggccgcatccgctgccgggtgtggccaatatcggctcccgcccgactgtacagggcaagggccagcaactggaagttcatctgattgatgcggcaatggatttatacgggcagcatccggatgtggtactgcgcaagaaattgcgaaatgaacagcggtttgcctcgctcgatgagctgaaagcgcaaatcgcgcgggatgagattgcggcaagggaatttttacaatccaacccctcgttatgtgtttaacggaataatattggaactgagaatcgaatgagtgactataaaaataccctgaatctcccggaaacagggttccctatgcgcggggacttagcaaagcgcgaacctgatatgctgaaacgctggtacaaagaaggtctgtaccaggcgatccgtaaagccaaaaccggtaaaaaaacatttatcctgcatgacggccctccgtatgcaaacggcagcattcacattggtcactcagtcaataaaattctcaaagatattattattaaatccaaaggcatggccggtttcgactccccgtatattccgggctgggactgccacggcttaccgattgaacacaaagtcgaacaggtgattggcaagccgggtgataaagtcacaccggctgagttccgtgccgcctgccgtgaatacgcaaaagagcagattgaaggccagaaggaagactttatccgtctgggcgtgctgggtgactgggatcatccgtacctgaccatggacttcaaaaccgaagctcatattatccgcgcactggcaaaagtgattgccaacggccatctggtcaaaggggcaaaaccggttcactggtgtacctcctgtgcctcttccctggcggaagcggaagtggaatattacgacaaaacctccccgtccattgacgtgcgtttcaccgctgcggacgcggatgcggtttacagcaaattcggcgtgaaaaatgacgggctgccggtttctctggttatctggaccaccaccccgtggactttaccggcgaaccgcgcgatttccctgaacccggaatttgattatcagttagtccgcgtgaacgacgaacgcctgattctggccgctgacctggtggaaagcgtgatgaaacgcgccggtatcaccagctggactgttgaagcgggctgcaaaggcagcgacctggaactgctgcggtttaatcatccgtttatgggctttgatgttccggctatcctcggcgatcacgtcaccctggatgcgggtaccggtgctgtgcatactgcgccgggccacggtcctgacgactatgtgatcggtcagaaatacggtctggaaaccgccaacccggtcgggccgaacggctgttatgtcagcggtacctatccgtcactggatggtgtgtttgtgctgaaagccaatgacatcattctggaactgctgaaagagaaaggcgcactgctgcacagtgaaaatatttcgcacagctatccgtgctgctggcgtcacaaaacgccggtcattttccgtgccacaccacagtggtttatcgggatggatgtgaacggtctgcgtccgcagtctctgaatgaaatcaaaggcgtgaagtggatcccgggctggggcgaagcgcgtatcaccgcgatggtggaaaaccgtccggactggtgtatctcccgtcagcgcacctggggcacaccgatgtctctgtttgtccataaagagacccaggaactgcatccgcgtaccctggaactgatggaagacgtcgccaaacgtgtggaagagcacggtattcaggcatggtgggatctcgatccgcgcgacctgctgggtgatgatgccgatatctatgaaaaagtaccggataccctggatgtctggtttgactccggatccacccactttgctgttgtcgatgcccgtccggagttccatggcaattctgcggacatgtatctggaaggttctgaccagcaccgcggctggtttatgtcctcactgatgctgtccaccgcgatgaaaggcaaagcgccttaccgcgaagtactgactcacggctttaccgtcgatggtcagggacgcaaaatgtccaaatcgctgggcaacaccatcagcccgcaggatgtgatgaacaaactcggcgcggatatcctgcgtctgtgggttgcttctactgactactccggtgaaattgcggtttcggatgaaatcctgaaacgttctgcagattcttaccgtcgtatccgtaacaccgcgcgtttcctgctggcgaacctcaatggtttcaacccggaaaccgatatggtgaaaccggaagagatgattgtggcagaccgctgggctgtcggccgcgcgctggcggcacaggctgatatcctgaaatcctatgaagcctatgatttccatgaagtggtacagcgtctgatgcagttctgctcggtggaaatgggttctttctacctggatatcatcaaagatcgtcagtacactgcgaaaagcgatggcctggcgcgccgcagctgtcagaccgcactgttccacatcgcggaagctctggttcgctggatggcgccgatcatgtccttcactgccgatgaaatctggaatgtgatgccgggcaaacgtccgcagtacgtcttcactgaagagtggtatgacggcctgttcgggctgaatgcacaggacagcatgaacgatgattactgggcaacgctgctggcggtgcgtggtgaagtcaacaaagtgctggagcaggcacgtgccgacaaactgattggcggctcgctggaagcagcggtgactctgtatgcggatgatgccctggcggcacagctgaaccgcctgggtaatgaactgcgtttcgtgctgctgacctctcaggcagatgtgaaaccgctgtctgcggcaccggaaagtgcggtaaacagtgagctggacggcctgcgcatcggcttcggcaaagcggaaggcagtaagtgcccgcgttgctggcattacgcgaccgacatcggtcaggatagtgaacatcctgaactgtgcggccgctgtgtgactaacgtagccggaaacggtgaagaacgtaagtttgcctgataaatgaaaaaaccactgtgttcgaccggattacgctggctgtggctggcggtcctggtactggtactggatgcgatttcaaagcagctgattttagccaattacgggctgcatgaatccacatctctgatgccgtactttaatctgacctatgtgcggaattacggtgccgcattcagcttcctcgcatctcagggcggctggcagcgctggttcttcacagcggtggctatcggtatctccgtgacattattagtgatgatgtaccgtaccagtgcacgcaataaactcagtaatattgcctatgcgctgattatcggcggggcgatcggcaatctgctcgatcgcctgatgcacggctttgtggtggattacatcgacttctatgtcggtgactggcactggccgacgttcaacctggcggacagctggatcatcatcggggcggggcttatcattattgaaagctttatccctgacggtaagaaaagcgacaaaccagagaacaagacatcatcagactgatgacccgaatatccgccgccaggcggatattttttatctgatacagagagtaataattatatgcaggttgcagaacatcacagcgtattactggattacaccctgaaactgtctgacggctcggtggcggattccacagaagcacaaggcaaaccggcgctgttccgccttggtgacggcagtttgtctgacgcactggagcagcaattgctgggcttatccgccggggataaaaaaaccttcacactgcccggtgaggcggtgttcggcaagccgagcccggatctgattcagtttttctccgccgccgatttcctggaagcgggtctgccggaaaccggcacgatcatgctgtttaccgcgatgaacggcagcgaaatgccgggaattatcaaatccgttactgaagattctgtcgaggtggatttcaaccatccgctgtgcggacaggatgtgacatttgatatcagtgtccgtgacgtcactgcataagacacagagcaataattagcattacggtccgggggacggctctggtatagtagcgcgcaaatgttgaatttttgttttactgcccgtccgggcgatggtttggaggctgaacgtgcgtattttactggctaacccgcgggggttctgtgcaggtgttgaccgggcaatcagtattgtggagcgggcactggagttatacggtgcgcctatttacgtccgtcatgaagttgtgcacaaccgctatgtggtcaatgatctgcgtgagcgcggtgcgatttttattgaggaaatcgctgaagtaccggataacgccattctgatcttctccgctcacggtgtctcacaggcgatccgccaggaagcgcgttcccgtaatctcaccatgctgtttgatgccacctgtccgctggttaccaaagtgcatatggaagtggcccgcgccagccgcaaaggcaaagaagcgattctgatcggccacgccgggcatccggaagtggaagggacgatggggcagtacaacaacccggaaggcggtatgtatctggtggaatccccggaagatgtgtggaagctgaacgtcaaagatgaggaaaatctcagctttatgacgcagaccacactgtctgtcgatgatacctccgaagttattgatgcgctgaatgcccgtttccctaaaattatcgggccgcgtaaagacgatatctgctatgccaccaccaaccgtcaggaagcggtacgggatctggcgggtcaggcggatctggtgctggtggtaggctccaaaaactcatcaaactccaaccggctggcggaactggcgcagcgggtcggaaaaccctcttatctgattgattctgccgatgacattaaccccgactggctgcgtgatgtggatactatcggcctgactgccggcgcatccgcgccggatgtgctggtacagcaggtaatcagccgtcttcaggaactgggggcggatgaaatcagtcagctggaagggcgtgaggaaaatattatctttgaagtcccgaaagagttacgggtggatatcaaagaagtctgacatagcaaagcagaacgcaggttctgcttttttttgtctgcagtccggtgaatacagttttactgataatcggcgggctgtattgtgattttctgatgatagcggcgggtaactggtaatccggccggactgccgttaatctgctgacatacagacagaaaactgaggataacaaatatgggtaagttacggctcgcggttgcgggtgccggtggccgcatgggacgccagctgattcaggcgattgcacagaatgatgatatggtgctgggtgcggcatttgagcgcgaaggctcctcactcaccgggactgatgccggtgaactggccggtaccggccgcaatggagtgatcctgacggctgatctgaacagccagaaagacaatttcgacatcctgattgattttacccgcccggaaggcaccctggcacatctggcgttctgtaccgcgaacggcagagggatgattatcggcaccaccggatttgatgatgcgggaaaggccgctattgcacaggctgcgcagcaaattcctgtggtttttgcggcgaatttcagtgttggcgtcaatctggtgctgaaactgctggaaaaggcggccaaagtcatgggcgactataccgatatcgaaattattgaagcgcatcaccgccacaaagtggatgcgccgtccggaacagcgctggcgatgggagaatctattgccggggcgctggggcgtgacctgaaggattgcgcggtgtattgccgtgaaggctataccggcgagcgggagcggaacactatcgggtttgccactgtgcgggccggggacattgtgggcgagcacacagcgatgtttgcggatatcggcgagcgtgttgaaatcagccacaaggcttcaagccggatgacatttgcaaatggcgcggttaaggcagcagcctggctgagtgataaaaagaacggtctattcaccatgaaggatgtgcttgatctggaaaatttataataaagtataaattacaacagattgataaagcagtggtattttgatttatcactgctttaactattctttttttataattctgtatctggcctctgttttttatcattatcatcgttgttgctctcttttttatcgctttttttgcctttctcacccctttttccggtcgtgagcctttttttcagtcatctcatcaaaaattcagcataaagctgataatgatacggttttatctctgtcagccagcctgttttgatcatgattagtaaaaaaatataaaaaagtcgattttctctggacaactgcccgttcgatctttagaatgcgccgcaatttgtcaaaatttggttaaatttctattttggcattgctttatagccccaaatctgaattaatatgcactaattgtgatttattattcctccggagggtgttttgtttaagtcagcaatcctggttctgcaagacggaaccacatttcacggacgcgccatcggcgcagagggtgccgttaccggcgaagttgtttttaatacctcgatgacggggtatcaggaaattctcaccgacccctcttattcccgccagatagtcactctcacttatccccatattggtaataccggcactaacagtgctgatgaagaatccccggatgtttatgcacaaggcctcgttatccgcgacctgccgctgaccaccagtaatttccgcagtgaagaaagcctctccgaatacctgaaacaccgcaacgtcgtggctatcgccgatattgatacccgcaaactgacccgcttactgcgcgagaaaggcgctcagaacggctgcatcatcgccggtgaacacccggatgcggcactggcgctgaaaaatgcacagagcttcagcgggcttaacgggctggatctggcgaaagaagtcaccaccgcgcagccatacagctggacacagggctcctggacactggacagcggcttaccggcggataaaacagcggaagagctgccgtttcatgtggtggcgtatgacttcggtgctaaacgcaatattctgcgtatgctggtggatcgcggctgccgcctgaccgtcgtaccggcacagaccccggcggaagaggtgctgaaaatggcaccggacggtattttcctctccaacggcccgggtgatccggcaccgtgtgattatgcgattgaggctatcacccgtttcctggaaaccgatattccgttgttcggcatctgcctggggcaccagttactggcactcgccagcggtgcaaagaccatcaaaatgaaatttggtcaccacggcggcaaccacccggttaaagacattgaaaataatgtggtgatgattaccgcgcagaaccacggttttgcggtggatgaggcgacgctgcccgcgacactgcgcgtcacgcataaatcattgtttgacggcacactgcagggtattcaccgtaatgataagcctgcattcagcttccagggtcaccctgaagccagcccgggcccgcacgacgccgccccgctgttcgaccactttattgaactgatgaaaaacgcccgtcactgatcaggagcagaaaaatggcaaaacgtacagatatcagcagcatcctgattttaggcgccggtccgattgttatcggccaggcctgtgaatttgactactccggcgcccaggcgtgtaaagccctgcgcgaagagggctaccgcgttatcctcgttaactcgaacccggcaaccattatgaccgacccggaaatggcggatgcgacttacatcgagccgattcactgggaagtggtgcgcaaaatcatcgaaaaagagcgcccggatgccgttctgccgaccatgggcggacaaaccgcgctgaactgtgcgctggatctggaacgtcacggcgtgctggcagagttcggcgtcgaaatgattggcgcgacagcagatgcgattgataaagccgaagatcgccgccgtttcgatatcgcgatgaaaaaaatcggtctggatacagcgcgttccggtatcgcacacaccatggaagaagcgtttgcggtcgccgatgatgtcggtttcccgtgcattatccgcccgtcattcaccatgggcggcaccggcggcggtattgcgtataaccgtgaagaattcgaggaaatctgtacccgcggcctggatctctccccgaccaacgaactgctgattgatgaatcactgattggctggaaagagtatgaaatggaagtggtgcgggacaaaaatgataactgcatcattgtctgctccatcgaaaacttcgacgcgatggggatccacaccggtgactctatcactgttgcccctgcacagaccctgaccgacaaagaataccaaatcatgcgtaacgcctcgatggcggtgctgcgtgaaatcggcgtggaaaccggcggctccaacgtgcagttctcggtgaacccgaaaaccggtcgtctgattgttatcgagatgaacccgcgtgtatcgcgctcctccgcgctggcctccaaagcgaccggcttcccgattgccaaaatcgcggccaaactggcagtcggctacacgctggatgaactgtcaaacgacatcaccggcggcctgacaccggcctcctttgagccgtccatcgactatgttgtgacaaaaatcccgcgctttaactttgaaaaatttgccggcaccaatgaccgtctgaccacacagatgaaatccgtcggtgaagtgatggctatcggccgcactcagcaggaatccctgcaaaaagcgctgcgtggcctcgaagtgggcgcgaccggttttgatccgaaagtgaacctggacgacccggatgcactgacccgcatccgccgtgagctgaaagaagcgggcggcgagcggatctggtatatcgcggacgcattccgcgccggactgtcagttgacggcgtatttaacctgaccaacgttgaccgctggttcctggtacagattgaagagctggtgcgtctggaagagcaggtggcagaagtcgggattaacggcctgacccccgaattcctgcgtcacctgaaacgcaaaggttttgcggatgcgcggctggcaaaactggtcggtgtggcggaagctgaaatccgcaaactgcgtgacagctatcagctgtggccggtttataagcgtgtggatacctgcgcggcggaatttgccactgacaccgcctatctctactccacctatgaagaagagtgtgaagcgcagccgaacaacgacaaaccgaaaattatggtactcggcggcgggccgaaccgtatcggccagggcattgagtttgactactgctgcgtacacgcggcgatggcgctgcgtgaagacggctacgaaaccatcatggtcaactgcaacccggaaacggtttccactgactacgacacttctgaccgcctctatttcgagccggtgacgctggaagatgtgctggaaatcgtgcgtgtcgaaaaaccggcgggtgtgattgttcagtacggcggccagactccgctgaaactggcgcgcagcctggaagcggccggtgtgccggttatcggtaccagcccggatgcgattgaccgcgcggaagaccgcgagcgtttccagcaggcggtcgtccgcctcggtctgaaacaaccggcaaacgccaccgtctctaatattgagcaggcggttgagcgggcaaaagaaattggttatccgctggtggtacgtccttcttatgtgctgggcggccgcgcgatggaaatcgtctgcgacgaaaccgacctgcgccgttacttccagaatgcagtcagtgtctccaatgacgcaccggtactgctggaccgcttcctcgacgatgcgattgaggtggatgtcgatgctatctgcgacggcgaacaggtgctgattggcggcattatggagcacatcgaacaggcgggggttcactccggggattctgcctgctcgttaccggcttacacgctgagtcaggaaatccaggatgtgatgcgcgaccaggtgagaaaactggcgatggaactgcgcgtgcgcggtctgatgaacacccagtttgcggtcaaagacaacgaagtgtatctgattgaagttaacccgcgtgcggcgcgtacggtgccgtttgtctccaaagccaccggggtgccgctggcgaaagtcgcagcgcgcgtgatggccggtcagacactggcgcagcagggtgtgacaaaagaagtcatcccgccgtactactcggtgaaagaagtggtgctgccattcaacaaattcccgggcgttgacccgattttagggccggaaatgcgctctaccggggaagtgatgggcgtgggacgcacctttgcggaagcctttgccaaagccatgctcggcagctcttcctcactgaagaagaaaggccgtgcgttgctctctgtccgcgaaggtgataaagcgcgggtggtggatctggcggcaaaactgctgaaacagggttttgagctggatgcgacacacggtactgcgattgtactgggtgaggcgggtattaacccgcgcctggtgaataaggtgcacgaaggtcgccctcacattcaggacagaattaaaaacggcgaatacgattacattgtgaataccaccgccggtcgtcaggcgattgaggattccaaagtgatccgccgcagcgccctgcaatataaggtgcattacgacaccaccatgaacggcggctttgccaccacactgtctctgaatatggatccgacagagagagtgatttcagtacaggaaatgcacagcctgattaaagataaataatcacgtttgttaaaataaaaaatccgctgcggcggattttttatttctccggaaaaacgatccgattcccttctgttaaaataattacctaactatattttttgctttttgttgtgtttatgttttgtttattctttctctgcggtaatgcaggtatattttttcaaatcctgttttatctatactgagagttaatgaatgaaaaaaaatttaatttccctgcttatcatgctgcctttttcatatgcgaacgctgatgataacagcaactactattatgcaagaacacttgttgatttatctgaatataaaaaagtcactgaagacgagattccggtattagtaccggaaaccagtactaaattatattttgtagaaaataattatcagccattgattacatctgaaattaaaaatgagtatgaccgcagtgcgggtatttcagaagttattcaaacatataattacttaaatgacaaaattaatcatacactgaacagtgttacggagatacagagtaattcccctgtttataatcagtcattatctcaaactattgatgaatttaatagtgacatgaaaaatatacaggatgctaatgaaaaacagggtgctaagctggagaaactgggggcggcagccctgtctgctgaagttaaaattaatgagataaatgagacaatatcaccggtattcaatgagatatctcagttaaaacaggatgcagacagtatcaaaatacagagtgaatctgtcattttatctgtgggtgaactgcatacggatatctcagccgttcagactgtgaataaagaacaggatgatcaactcgaagaacttcattcgcaaaataaaaacataagaaataatatcaattctctgattgaacgagcgatccctgccgataatgcaatttatcagttaaaacaagatagtaagaagaatgagcaggaaattaataatctggaatcagctatcgaactgacagatgaagtgaatttttcacagggtaacgaaattcagcaacagggaaaaatgatctctgaactgaaagccgattcagacaagctgacaacagatttaaaagatgttcgcaaaaagagtaatacgacaaccaatgtggctaatgctaacagaagagatattgataaacatgcgaccaaaattgataaaaataccctcgatatcctgaagaaccgccaggatctgcgttcactggaaaatgatttacgtgaaaccaacgagcgccttgataacggtctggcggccagtgccgcactgaacggtctgttccagccgtacggtgtcggtaaactgaatatcactgcggcgatgggcggataccagtccactcaggcagtagcagtgggaaccggttaccggttcaacgagaacatcgctgtgaagacaggtgtcgcatacaccggttcgaacgatgtgatgtacaacatggcttttaaccttgaatggtaatgctgtgttatggtgactgaaaggtcatgtttcatatactcctcctttcatattggcgtttgaatttatttttaataaatagtgaattaattatattgatgacagcaaggctgaaatttggataattaatcctgctatatttgccatgctttgggaaatacatattgcgttcgtgtatttccccttttttatttatgaattatttgtttattgaatggtcatttgaaaagcagttataaaataaataaaaaccacctgtataatttatacagatggctttcagacagtaactaacttaattaaattcttttggatccggccctaagcgggtacctgaatcgagagactgaatttgtgagagttcttctttctccagacggaaatcaaagacatcaaagttttcatgaatccgcgaaggggtgactgatttcggtatcacaatcagcccgcgatccagatgccagcgaatcactatctgtgctggtgttttctggtatttcgccgctaatgcctgaatgatatcagtatcaaaaacgccttcgccgccctgtgccagcggactccaggattcagtgtgaatggaatgggtcgcattccaggcctgaagctcgcgctgttgcagcagaggatgcagttctatctgattgagtaccggtgccacgccggttttgtggataatgcgctgcaaatggccgatatcaaaattacagacaccgatactgcgggtcagtccggatttctgtaattcaatcaactgctcccaggcggagacataatggtcttctgccggtgcgggccagtggatcagatacaaatccacataatcgagctgtaactttttcaggctcgcttccagcgccttaccggcatgttgctgatcgctgttccacagtttggtggtgataaacaactcgtctcggggaacggtggtcgctttcagtccttcaccgacaccttcctcgttctgataaatcgcggcagtatcaatcagccggtaaccggtttcgagtgcggtctgcacagcagagccgaccacgtcgttcccggctttccagacacccagccccagttgcggcattaagtgtccgtcagataaggtaactaatgcaggtttgttcatgtggcctccaatcagtgtttatggtgtatcagacggcagcccggtagatccgttcactgacttccggtgtgatgtcctggtgttcacccagggcagtctggccgtgttcagtaagcttggcaaccagtttgggaatgccgctgtcatcaatctgataatcagagaaacgggtttttatgcccagctcttcaaagaaaacgcgggttgcttcaatggcgcactcaatccggctctcttcagaaccgtctgtcagatgccagacacgctcagcgtactgtaataatttttcgcgcttggttttgcgtttttcccgcagcagtgccggtaacacaatcgccagtgtctgcgcgtgatccagtccgtacagcgcagtaatttcatggcccagtgcgtgggttgcccagtcctgcggcacaccggcaccaatcagcccgctcagcgcctgggtggcggcccacatcacattggcacggctgtcataatcctccgggtttgccagtactttcgggccttcctcaatcagtgtcagcagaataccttctgcaaaccggtcctgaattttggcattcaccggatacgtcagatactgctcgagggtgtgaataaaggcatcgaccacaccgttggctgtctggcgcggcggcagggtgtaagtggtctgcggatcaagaatggcacacttcggatgcaccagcgggtgaccgaatgattgcttatctccggtttcacggcggctgaccacagaaaaacagttggtttcagaaccggtggccggaagtgtcagcacacaggcaatcggcagtgcactgcggatattgcggcctccggtggtgatgatatcccacggatcgcccggataatccaccgcagcggcaataaacttggtaccgtcgataacagacccgccgccgaccgccagcagatagctgatgtcatgctcacggatatacgcaatcgcttttaccagcgtttcataggccgggttcggctcgatacctgaaaattcatgaacatcataaccgtccagggcagccagtacctgctcgtaaacaccgttacgcttaatactgccgccgccgtacagcatcagtactttggcatctttcgggatttcactgctgagtttggcgatttggcctttgccgaaacgaatttttgtcggggtgaaaagagtgaagttgttcattatttctccgggtaagattaggaaaaatgaagcggataaccattaagtgtagtgtaaatcagggcaggcgtggtggcgaaccggattgtgctttccggcacaccggcagcaaaaaggctcccgcaggagcccttatcttatttcttatggacgcggtggcgtctgcggttaagcagggcgcggcgtctgcggtagtgtcggatgagcagatacagggatgccacgataccgacaatcaggaaaaagaccgggatcagcagcagtgcggtcattaccgttttttcgtgtgctttgacaaacgggatctgattgagcacataaccgaaggtggtaataatcgccacccagaggaatccgctcagccagttaaagaactggaaacggcggttcggcagcgaggagagacctgccagcatcggcagcagagtacggacaaaaccgagaaaacgaccgatcagcagggcatacaggccgtggcggttaaacagcacttcggctttctgatggtaatttttcgggatctgcgtcatccagcgcctgacggttttggtatcactcagccagcgcccctgaacaaaacccagccagctgccgataccggcggcggcggtcagaatagccagtgtcggcaggaaatccatcacgcccttcgcaatcagtgcgcctgacaaaataagcagggtatccccgggcagaaacgcggtgggcagaatgccgttctccagcacaataacggtgaagaggatagcgtaaaccagccagaggacttcgggattagagagtgtggcaaaatcgtgagaccagagcgcactcacaatctctgataaactagacattagatttcctgtaaaacgagatccggaacaacggtacagacagtgtatcgcaaaaattgctcacccgtttgatttgatcgggtttttcttccgattcactgacggtataaagggaggttggtgaatcatgtctctgtgggcattttttgtgcgttttatctgtggtgatcccggacggatgactgaaaacccttagcattccgtgtgaaattttccgccggaatcgcatttttttggtaaacggtaatgataattactatcaaattgctcagggtttggtatgatcagcgggtttcgttttttgggtagcgatgaataacacgatttattttttgctgagaaagagttcataacaaaagagagttgaaggccaactgatgcgtaatttgaccgtttctgtgctattggcattatgtttaaccggcagtgcattcgcagataacactgcagctgtcacaccagcgacaacaacacctgtcaccgcgccggcagcaaccgccggtcagcctgctcagacgcctgaacaaccggcggccccggtatccgcgacagaggttcctgttcaggaaatcagcgcagcaccggcagacggtaaccgtggctttgcggcggaattgtccgtgatttccatgtatcagggcgcggatgttatcgttaaatcggttatgatcggccttattatagcctcagtgattacctggtccattttctttgccaagggtgcggatcttatcgcttcccgccgccgtatccgccgtgaagcggcagcaatcaaagatgcccgctcgctggatgaagcggctgcgattgccgataaattcgggaaaaagagcgtcacccggatgttggtgcttgatgccgtcaatgagcggactgcatcagaaaaaagccgtgatctgagcggcatcaaagaccgtgtgacattccgtcaggagcgtatcgttgccggtgttgcccgtcatatgggacgtggtaacggctatctggccactatcggggctatctcaccgtttgtcggtctgtttggtacggtatggggtatcatgaacagctttatcggcatcgcccactcacagaccaccaacctcgctgttgtggcgcccgggattgcagaagcactgctggcaacggcactgggtctggtcgcggcaattcctgcggtcgttatctacaacatctttgcccgtatgatttccgcttaccgtggtgacctgggtgataccgcagcacacactattttatggctgggccgtgatctcgacctggcagacagcaaagcagggtaatatctgatggcaatgcgtcttaacgaagagtcggatgacagcggcgaattgcatgaaattaacgtcacaccttttattgatgtgatgttggttctgctgatcatctttatggtggccgcaccgctggcgaccgttgatattaaagtgaatctgccggcctcaacggcaaaaccacagccgcgtccggaaaaaccggtcttcctgacggtgaaagcagataaccagctgctggtgggcgagcaggaagtcacaaaagaaacactggctcagatcctggatcagaccacggaatccaataaggaaaccacgatcttcttccaggcagataaaacggtcgattatgaaacgctgatgggcattatggatgctctgcgcaaagcgggatatctgaaagtcgggttagtgggtatggagtcggcggagaaataatcatccgcagcctgaaatgaaaaaagccgttcatgatgaacggcttttttgttgccacactctgatggcctcagcgcggcggcgggtgagttccgctttgatgtccgcgcctttaaaaccggcctcaatcaccggtttgacggcaaccagctgtgcaagcgagaaggcctcagccagtaactgcccctgcggataatctgctgcatccggtgctatccggctgcggtaatccgcttcacaaaggatagccaactgagtgatgcgctccggcttgcgccaggcatccagtgaatcaaacagggcaatgatatcgtctgcggccagatggctgatgtcatgaacagtccggtaatcacgggtggcaagcagagccagatcccgtgccgggttcggcacccgcaggcgctcagacatcttctgaattgcggcggtttcctctgcggtactgtgacagctcaggtaaagacacagcgcagcaaagcggatatctgtactgtcagtcagaagcactgtccggcgcaggagtgcggcggtcaggatgtcatagcctgtctgcccgtcagtggcgctgaacagggcttccagctccggaaacagcactgccagcgcaccgcaatcacgcagtaccgcaaaatagatatccgggcacgggctgttcagggctttttctgtctctttccagacccgctccgccgtcagatgggcaagctctccctgctgcgtgatagcagacatcagcgccagggtttccggtgcaataacaaatccctgcggggcgaaacgggcagcaaagcgtgccacgcgcagcacgcgcagcggatcttccgtaaacgccgcagaaacatggcggagcacccggtttttcaggtcatccgccccgtgatacgggtcatgcagtgtgccatcaactgattgggcaatggcattgatggtcagatcccggcgctgtaaatcatcttccagcgtgacatccggcgcactgtaacaggcaaacccggtatatccggccccggttttccgctctgtccgggccagcgcatactcctcccgggtatccggatggagaaataccgggaaatcacgcccgacctgctgatagccgcgcgccagcatcatttccggggtggcaccgacaaccacccagtctctgtccgagacaggcagacccagcagggcatcgcggactgcgccgccgaccagataaatatccacgcttttctccgtactgcggttactgtgaggctcagttcatccagcgatcttttttcttgcggcgcgggatcatatgcgggagcagcagacccagcagcagaccggcaccggctacaccgccgccgtacataaaccattgcaggataatatcgcgttgtttgtcatccagctgcacactgatggcatccagttttttctttgcgaccacaacctgattacgcaggctgtcattctcttttttcaggttattgatgatatcatcactggcggccacacggttttgcatgtccgccgttttgtcgttccaggtgccgtcgatattggcgagtttgccgcgcagggttttaatttcttcttccatggccggtacgcgttctttcaggctcggcgtggtgctcagcagctctttcggtaaccagacatcacggtttttgctgtcacggacacggacaaaaccgctctcattattcacatcaagaacggtgactttttctccggaattgagtgaaccggcaatgcgatagcggttgctcgggccgctgtgaacataggtggagaggtcatcagagacataacggatttcttcagcatgggcggtaatgctgacggttgctgcaaacagcaaagggagtaaggcgagttttttcatcgtcataagctttatcaatcgttggttatgaatagcatactaatgagttaagtgtgcgggtgcaaacgttaaacagccatgagattactcttaacaacggaataaatgacgggataaagtggataaacagcgaaaaatccggctgtttataacaaattagtgtcatctttatcacgaatgcagggtcagactgacgataaataacggtataagattacgggaatgtctatgagcgattacgaaacagaactgaaatttgcggtaaaaccggaagccatcacggcggtgatcgccgcgctgaccgcctttcctcatcagcatttccgtgctgtccgcctgaccaacagctattttgaaacagctgacgacacactgcggcagtgggatatggggttgcggatccggggatgtgataccgaatatgaaatgaccctgaaaacggccggaaatgatatcggcggtttacatcagcgtcctgaatataatattccgctctcccgcccggaactggatttagcggcactgcctgctgatgtctggccgccggaaacggatgtcgcggcgctgcaatcatcactgcaggctcgttttaccacggatttcgcccgtgaaaagtggctgctgacagtcaatcacagtgtggtggaagcggtgctggatcagggcagtgtggttgccggtgaggcagaatgtccgatttgcgaatttgagatggaactgaaagaaggtacagccgctgatttgctgacagctgccaaagctctggcggaattgccggggctgcgccttgccgggcgcagcaaagcggcacgcggctactggctggcacagggcgcaccggtaccgaaactgcctgaactgttcacagcgtgggatccgcagaccccgctgaccgatgtggttgtccgtctgatcaaacagtggcagagcctggaagaagcctggctgctggatgcggacggtgcattaccggcattgcagcaaaccctttctctgctgctgacactggcagaccactatcccggcgcggtgcctgatttcgtccgtgactgtccgctgccggaggtggcatcgtcactggcggaagcggatgcaaaatctgcggatgtctgtttcagtccggtatggttgcagtgtaaactggctttcacgcaatgggttttcgcactgtggatggcggcgcctgccatgccgtaaccgggtgttgagctgttatgtgaatctgataacaaaaggaacattgatgctgccgctgaccccgatactccggcaagctgctgagcgggtaaccgcccggcttgataccggactggtgccttactctgaacaggaagcgctgatttttgccggcagtgattttgtggcagagcagtgtatccgccacccggactggctctccgccctccgcaatacaccaccgcagccggatgaatggcaggattatgccgcccgcctgacggagatgatggcggatgccgcacaggaagaggatgtgatgcgggtgctgcgcctgttccgttatcagatgctgatgcgcattgccgtcatgcagatcctgcgccggagcacgacagaagagacgctgcgccagctcagtgaactggcggaagtgctgattatcgccgcccgtgactggctctatcagcgctgttgtgcggactggggcacaccctgctcggcagacggcagcgcaatgccgcttctgatcctcgggatggggaaactgggcggcggcgagctgaatttctcctccgatatcgatcttatttttgcttatccggaaaacggtgtcacacaaggtggccgccgcgagctggaaaacgcgcagttctttacccgcctgggacaaaaaattatcagaatgctggatcacgccacggcggacggtttcgtctaccgcgtggatatgcgcctgcggccgttcggcgacagcgggccgctggtgttcagcttctccgccctggaagattattatcaggagcagggacgcgactgggagcgttatgcgatggtcaaagcgcgtatcctcggtcgtgatgattctgcttacagtgagacgctgcgccggatgctgcgcccgtttgtttaccgccgctatattgatttcagtgtgatccagtctctgcgtaatatgaaaggtatgattggccgtgaagtccggcggcgcgggctgaccaacaatattaaactcggtgccggtggcatccgggaagtggaatttatcactcaggtctttcagttgatccgcggcggacgtgagccgggattacagacccagtccctgcatgcggcgctggcggaaatcgcccgtctggggctgctcggtgaggagcaggtcgcgcagttgctggatgcttacgcgtatctgcggcggctggaaaatctgctgcaggccattaatgacagtcagacacagacgctgccggactcaccgctggatcaggcgcggctggcgcaggggatggataccgcttcgtgggcggatctggaaacggtgctgaacaataaaatggcggcagtgcatcagatttttaccgatcttatcggtgaggatgatgaggaaagtgaggatgaaaccgccttacagccgtttatctcgctgtgggagagtgagccggaactgactgatatcacctctctgttttccctgaatgaagaagatgccgcacagtttcttaccggtttacaggggttccggcaggatctcggcaaacggaccatcgggccgcgcggacgggatgtgctggaccacctgctgcccaaactgctggcgaaactggtatcacaaccggatgcacagcgggtgttgcagcgcctgacaccgctgctgctcagcattgtcagccggaccacctatctggagctgctgctggaatccgatgtggtactgacccatgtggtgcggttgtgtgcggcatccccgatgattgccgtgcaactggcacgccatccgctgctgcttgatgagctgctggatccggcctcactctaccagccgctgccactgaatgcgtaccgcgatgagctgcgtcagtatctgatgcgggttccggaagacgatgaagagcagcagcttgaagcactgcgccagtttaagcaggcgcagttactgcggatcgcggcggaagatatcaccggcgtgctgccggtaatgaaagtgagtgatcaccttacctggctggcagaagcgatgatcggtgctgtggtgcagcaggcgtgggggcagatggtcagacgttatggtgaacctgcacatctgacccgcgacggggacaaaggctttgcggtgatcggctacggcaagctgggcggctgggagctgggctacagttctgatctcgacctggtgtttttgctggattgcccggaaggcacacaaaccaccggcccgcgtgaaatcgacgcgcggcagttctatctgcggctggcgcagcgcattatgcatctgttcagcacccgcacatcatccggcgtgctgtatgaggtggatgcccgtctgcggccatccggggaagccgggatgctggtcagcacgctggaggcatttgcggattaccagcagaacagcgcctggacctgggagcatcaggcgctgatccgtgcccgtcaggtgtacggagatgaggcgattgctgcccgttttgacagcatccgccgcgatattctgtgccgtcagcgtgataacgcacagttgaaactggatgtccgtgagatgcgcgaaaaaatgtatcagcatctcggcagccgtgatgacagcgtgtttaacatcaaaactgatccgggcgggatcacggacattgaatttatcgctcagtatctggtactgcgttttgcaccggagaataaagcgctgatccgctggtctgataatgtccggatttttgagctgatggctaattatgatgtgatgccggaagaggagtcactgcggctgactgcggcctacattatgatgcgcgacaggctgcatcatctttctttgcaggataaatccggcgtggtgccgctgactgaatttgccgctgagcgcgaatttgtccgcgcccgctggcagcactggctcggggaataagcaccggttgccgcacgcggattttctgtccggcggccggtttgtgatattatcagcaataatttcgttattcataaggtggagcagggaatgaaagtaacactcccggattttcagaatgccgcagttttagtcgtcggtgatgtgatgttagaccgttactggcacgggccgaccagccggatctccccggaagccccggtaccggtggtgaaagtcactgaaattgaagagcgtcccggcggcgcggcaaacgtggccatgaatatcgcgtctctgggggcaaattcccgcctcgtggggctgaccggtattgatgacgccgcccgtgcactgaccgaacgcctgaatgatgtgaaagtccgctgtgattttgtcggcctgccgacacacccgacgatcaccaagctgcgcgtgttatcccgcagccagcagctgatccgcctggattttgaagaaggtttttcggatgtagatccgcagccgatgcttgagcgtatcgcacaggcactgccgcatatcggtgcgctggtgctgtcggattacgccaaaggcgcactggcgcatgtggaagagatgatcgcgctggcccgcaaatccggtgtaccgatcctgatcgacccgaaaggcaccgattttgcccgttatcgcggcgcgaccctgctgacgccgaatatgtcagagtttgaggctgtggccgggaaatgcaccgataatgctgatatcgaagaaaaaggcctgaaagttatccgtgatttcgatttgcaggcactgctggtgacccgctccgagcagggcatgagcctgctgcgtccgggacagcctgccctgcatctgccgacacaggcgcaggaagtgtttgatgtgaccggtgccggggacacggtaatcggtgtgctggcaacctcgctggccgccgggaaaaccctggacgaatcctgtgcgctggccaatgccgctgcaggtgtggtggtcggtaagctggggacatccaccgtatcgccggttgaactggaaaatgccgtacgcggccgcagcgataacggctttggtgtgatgaccgaagcagagctgcatcaggcggtggcggatgcccgtcagcgcggcgagaaagtggtgatgaccaacggctgtttcgacattctgcacgccgggcacgtctcttatcttgccaacgcccgtaaactgggggaccgcctgattgtggcggtaaacagtgatgcctccaccaaacgtctgaaaggcgaaagtcgtccggtcaacccgctggatcagcggatgattgtgcttggtgcgctgggtgctgtggactgggtggtgccgtttgaggaagatacgccgcagcgtctgatcgcttctgttctgccggatgtgctggtgaagggcggggattaccgtccggaagagatcgccggtagtgaggaagtgtgggccgcaggcggggaagtgaaagtcctcaattttgaggatggcatttccaccaccaatatcatcaatacgatcaataaatcaaagtaaccggctgattatgcaggagatacgcacggcgtatctcctgttgtcattactcgccgcctttttccgccaggcgcgcttccagctctgccagacgtttttccatctgcgacagcttttcgcgggtgcgcagcagcacctgagtctgcacatcaaactcttcgcggttgactaaatccagcttgccgagctgtgactgtaaaatggcacgcatctttttatcgatatccgctccgatctcccgcacacctttcggcagcgcgctttgcagctgtgtggcaatctgttcaatttttttcgggtcaatcatgatttttcctttctgagccggaggatcgttatgccgcaaatagtaacctgttacgggattctgaaccagtctgagttctcattttgagcccctggtaaaaataaccactggccgggctcactcgttgggggtatagtaactctgctatctcagggcggggtgaaagtccccaccggcggtaaacattccattgcgaatgaagcccgcgagcgcttcactacggtgaaggtcagcagatccggtgtaattccggggccgacggttatagtccggatgggagagagtcagcatcagccgggcaatatccgcccgtccgatcgcatatcatcaattatctgcacaggtaaaaacctgttgcggcatggttttatgacatggcgttatgatatgtatgcaactcctaagatgccctggttctggtaatcatttttaattacgatgaggtttatttaccatgaatcagacgctgttatcagattacggcaatccgattgaacgtgcagaacgtgccattgaagctatccgtcagggacggggggtaatggtactcgatgatgaaaaccgcgaaaacgaaggcgacatggtgttcgccgccgaaaccatcaccgttgagcagatggcactgaccatccgtcacggcagcggtatcgtgtgcctgtgcctgactgacgaacgccgtcagcagcttgagctgccgatgatggtggagaacaactccagccagttcaaaaccggctttaccgtcacgattgaagccgcacacggtgtgaccaccggggtgtctgcggctgaccgcgtcaccaccatccgcgctgcggtggctgatggtgctgttccggcagatctgaatcgtccgggtcacgtattcccgctgcgtgcacagaacggtggtgtgttaacccgccgcggtcataccgaagcctctgttgacctggcgacactcgccggtctgaagccgtacggtgtgctgtgtgaactgaccaacgatgacggctcaatggcccgtgcaccggaagtgattgtgtttgcaaaagcccatgatatgccggttgtgactattgatgacctggtgcagtaccgtgagcagttaatggcgaaagcgggctgacatcactgacagggtcagtaactgaacaagactgaaatcctgagaatgccgctgctgacacagcggcatttttgtatccgcactcctgtcatattttttgaataacttcatcatgattaccctgcgtgataaatcccggaatggcatacactgatctcagtgaacaatttttgtgtgaggtcagcaatgaaacgattaccggctctgtttgcgggtcacggcagcccgatgaatgtcctggaaaccaaccgttataccgaaacctggcggcagctgggagaacagatgccacgcccgtccgccattctggtgatttccgcgcactggtatacacagggggcgtggctgacatctgccgcacacccgcgcactatccatgattttcgcggttttccgcctgcgctgcatgaaacggaatatccggctcccggatcatctgagctggtggcgcgggtaaaagatctgctcagtgatgataatatcggggaagatcacggcgagtgggggttagatcacggcagctgggggatcttagtgaaaatgtatccggatgcggatatcccggtggtgcagctcagcctcgacggcagcaaaccggcgcaatggcattatgataccggccgtaaactggcggcactgcgcgatgaaggtgtgctggtgctcggcagcggtaatgtggtgcataatctgcgagaaatggactggcagaatgcacaggccgaaccgtatccgtgggcagtgagctttaataatttcgtgcgtgataacctggagagcgacgcccggccgcatccgctggtgaatgcacttgagcgcgaagacggcaaacggtcgaatccgtcgccggaacactatctgccgctgctctatattctcggtatgcggcagggcagcgagccggtcaccgtaccggtggatggtattgaatccggctcactgagtatgctgacagtcaaagtcggctgacgatttcttttgtcataaaaaatccccgggacatctgatgtcccggggatttttgtatcagccagagactattcgtcagtcaataatgacatgcggatagaaacgggagagatcctgggtgataagctctttatcttcacggatgcagatcccggcagattcatcatttaccagccaactgcctacgagggtatagctgtcgccgaatttcggcagggaatggaactgctggacaatcatgccttcttcgccgtaagggccgtccgctgcggcgatttctttgccgttttcgataatacggatattggcaccttcgcgggagaacagcggcttgatgacgtagctctccatttcaggatatggtttatccgcaaaataggcaggcagcaggttcggatgatccgggaacatttcccacagcatcggcagcagggctttgttggagataatgctcttccaggccggttccagccagcgaacaccggcgtctgtcagcttggtggagaaaatctccctcatcataaattcccacggatagagtttaaacatgttgctgataatctgatcctgaagatcagtaaactcaccgcgatcgcccagcccgatatcttcgataaacagaaaatcagtggtgacaccggcttcccgtgcacaatcctgcaaatactggatagtaccgcgatcttccacggaatcctgacagcaggccatgtgcagataacggaacccgtactcttccgccagcaccccgaaacgctcaatcagcttttcctggatgccgttgaactgatcggcattttccggcaggttaccggcggcaatctggtcttccagccagatccactggaagaaagcagattcatacagcgatgttggtgtatccgcattattttccagtaacttcggcggattaacgccgtcataggccagatccaggcgtgaataaagcgacggctggcgggttgcccatgactcacgcacgaaatcccagcagtgtttcgggatttgaaaacgggccatcagctcgtcactttgtgtgactttatccaccacctgaagacacatctgatgcagttcgctggtcacttcctcgatttcatcgatttgtgccatagaaaactgataacaggcatcttctgaccagtacggctcgccgtacatagtatgaaaatggaagccgaattcctcggctttcccgcgccagtcagggcgctcgctaatcgctacgcgtttcatgtaaatcagccgcccattgaacgggaagatgaattgctgctgccggatgagcgctgcatggtgttctgtttcgccacgctgtcaccgaagccaccgcgtgtggtggtggttgtggtggccggttttggtgccatggcggttttcggtactgtcatgctgcgtccgccggtggcagaaccgtagtttttaccggtggcatcaacaaacttgccgttagccgggcttgccgggttacgggaagtgaacagcggctgagaagcagcggcaccgccgcccatcatacggcccatcatataaccggccatcagcggcatccagaagctgccggatgcctgggcaggttgctgctgctggctgttattcgccagctctgttggtgcctgagtacactgggcttcaccgaattccgccacgcagtcttcgcgggtggcatatttcggtgcggtttttgctgcttcttccagtgcgttgttataggcagtggtacattcaccggcctgtgacgggttcgcggcggagcactgctctgcggtggtgtagagcgcaacggtttcatcggcttcatcgcaggcggttaacatcagaacagcgccgacagcagccgcaacaggtgccaggcggtactgacgccaggttttgcggaaagcgtcgcggttaatattcttggtgcgtttcattgtcatcgtcgttatatccggaaacggttttatgggaggtaattactgtctaggataggggaaaactgtgtgaaattaaagcaataatctgctttttgcatctgatgtgaattaaatcagattaacagaaaaaaaagataccggtatcgcggtatttttacggggggaatacgcccggccggtgtaattatattgcggcctccggtatataacctgatatttcactgcccggcagaagtattatccgcaaaaacagcaaaagtataaaaaaacccgccggaaggcgggttcttatcatacaaacatcaggatcagcgggtggtcggtgccacggaagccggtgatgtggaaatagttttacccagcacctggttgaggcgcaggatatcgtcttcattcagcgtaccgcgtgcctgaccgatataaagctggttaatcagatagtcataacgggcgttggacagacttttcttcgcttcatacagggtagtggtggcgttcagcacatccacaatcgtacgcgtacccacctgataaccggcttcggttgcatcgagtgagctttccgcagaggtcacaacctgtttgtaggcgttcacgctgctgattgaggcgttgatattgttgtaagaagagcgggtggtctgaacaacctgacgcagtgtcgcttccagtttttcgctggcagcggtatagccgtactgagcctgatcaacctgtgatgacacggcaccaccggtgtacagcgggatactgacgttcacgccgatggtgctctgaccggcgtagctgttatttgggcggccgttagggtagccgttgccgctgtaatcggtgttggttacgcctgtgccggcactcaggtttacagtcggatagtgaccggattccgccaggctgatttgctctttcgccagattacggctcagtgtggcacccagcaggttcaggttacgttcctgtgcttctttcagcagggcttcgatggcatccggggcattggttttaaagcggttcacatccagggaggctaattcgctgtaataaataccgctcacctgacgcagtgcttcaatggcgttttcgacatcattacggccggcgacttcctgagccagaacactgtcgtagttagcgcgggcgttctgtacgtcagtaatggctaccagacccacattgaaacgctgagtggtctgatccagctggcggtagacggcttctttctgtgcctgtacgaaagacagggtatccagcgcgcgcagaacattaaagtaagcaacggcggtatccacaatcagctgctgttgggcactctggaatgtgatatcgctgatcccggcagtttgttcctgcaggttcagctgacgccatttgctcatgtcaaaaattgtctgagtcagtttcagctgtgcattcagtgcattattgctctggttactgttatcacggtaaccggtgttatagtcataacccccgcttaaacctaactgcggcagtaacggactgcgggcttcgttaattttttcgaaagcctggttacgttcagcctgagtctgacggagggtcgggttggtctctttcgctttttgataaacctgcaggaggtcttcagcctgggtgacagagctgaaacctgccacactcacagcaatgagaagagaaagcagtttcttcattaggattcctttttgcacagcgctaatctgtcagttgcctcacgggaagcaccaaatggctctaattctagcagagtccgctcgctaataaaggtagccgtttgtgccttctgcgttaaattagcttaactttacctcaacgggatgaaaatttctttatctcagcagaggaaaaaggccattatcactgataattgatgtattggcggagaaaatagtatgaaacacacatccggattaccttttgcgttcagcagcgatgacgtggagataatcagtaagaaaaccctgttttcaggattctttaagattaatgaataccgtttccgtcaccggttatttgagggcggctggagcccggaaatccgccgcgaagtcttcgaacggggcaatgccggagtgattttgccgtatgatccggtccgtgatgaaattgtgctgattgaacagattcgtctgccggccatcgaaagtggtcagacgccctggctgctggaagccgtggccgggatgatcgataaaagcggggaatccgctgaagatgtggtacggcgtgaagcggaagaggaagcggggctgaaaatcggccgctgtacctttgcactgagttatctttcaagcccgggcgggacgtccgagcggatgtatgtgtatatcggcgaggcagataccacagcggcgggcggggttcacgggctggcgcaggagaatgaggacatccgtgttcatgtggtcagccgggaacaggcgtatgaatgggttgaaaaaggtgtgatcgataacgcagcaactgtcattgcaattcagtggcttacactgcactatgaacgtatacgcacaacgtggcgggataaataatccggatttttttatacgcatccggggaattgtgtgcgggattgcagatcttcttcgccgaaacacgttatcattatatgttagttgttaaaataacaaggacatcgattggaaaccccgttgcacttgcccgtggctgacggcgctgcggtcagaattttacagattactgatacgcatctttttgccggcgaaaccgacacgctgctgggcattaataccctgcacagttaccatgccgtgctggatgctatcgtaaaacagcagttaccggccgacctgattgttgccaccggtgatctggttcaggatcagagcacccgggcttatcagcggtttacggacggtattgcccgtttaccggcgccgtgtgtctggctgccggggaatcatgattaccagccgtccatggcgcaggagctggccgccgccggtatctctccctccaagcaggtgctgctcggggatcagtggcagatcctgctgctcgacagtcaggttcagagtgtgccgcacggcgaactgagtgatgatcagcttatctggctggataactgcctggcgcagcagcctgaccgccatactgttgttatgctgcatcaccatccgctggcatccggctgtacctggctcgatcagcacagtctgcgcaactcgcatatgctggctgaggttctgacccgctatcagaatattgaaggtattttgtgcgggcatattcatcaggatctggatgtgatgtggaacggtatccgcatgctggccacgccgtcgacctgtgtccagttcaaaccgcactgcaccaattttacgctggataccgccgctccgggctggcgttatctggagctgaccaccggtgataatccgtcgctgaccacacagctgttccggctggatacggatgaattcagccccgacctgggttcggacggttactgatggcgacgctcctttatctgcacggcttcaacagttccccgttgtcagagaaagggacgatgctgaaagcgtggctggcagagcaccatccggcgatccggatgttacagccgcagatcccctgctatccggatgaggctgcactgtttctggaagatctgatgaactcgctagccggtgagaccaccggaattgtcgggtcgtcgctgggcgggtattttgccctctggctgtcacaggcgtttgatgtccccgctgtggtggtcaatccggctgtatatccgtttgatctgcttcaggattatctcggggacaatcaaaacccctacaccggcgaacgttacacactcgaaccgcatcatatgcaggatttacgggcgatttttgccgatcctgtcgaatcaccggatttgatctggttattgcagcagaccggcgatgaagtgctggattaccgccaggcggtcacccatctggtggcatgcaaacagacgattgaacccggcggaaaccatgcctttaccggatttcagcgctattttccgcagataattgagttcctcggcctcggccattaatgaaaaatcgtatttaaatttatcagggactggtattatcgccagtatcattcacgtattttgtttattttttagcgaaaaaccgataatccaacatgacgcaatcatcttataacgcagaggatattgaagtcctcagtggtttggagcctgtccgccgccgtccgggtatgtatacggacacgacgcggccgaatcaccttgctcaggaagttatcgacaacagcgtcgatgaggctttagctggtcacgctaaatctgtcgaagttattttacataaagatcagtctgttgaagtgattgacgatgggcgcggaatgccggtggatatccacccggaagagaaagtctctgcggtcgaactgatcatgacccgcctgcatgccggggggaagttctccaataaaaactatcagttttccggtggtcttcacggggtaggtatttccgtggtcaatgcgttgtcaaaacgcaccgaagtgactgtccgccgtgacggacaggtttatcagattgcctttgaaaatggtgacaaagtcagtgaactggctgtcatcgggcagtgcggcaaacgcaacaccggtaccagcgtacatttctggccggatgagcagttttttgacagtccgcgcttctctgtctcccggctggtgcatctgctgaaagccaaagccgtgctgtgcccgggtgttgagatccttttcaaagataatgtgaacgagactgaacagcgctggtgctaccaggatggcctgaccgattacctgatggaaaacgtcaacggcctggtcactttgccggaagcggcgtttaccggcaaacatgccggggacaacgaagaggtggactgggcgctgctgtggctgccggaaggcggcgaactgctgactgaaagctacgtcaacctgatcccgaccccgctgggcggtacccatgccaatggcctgcgccaggggctgctcgacggtatccgcgagttctgcgaattccgtaatattctgccgcgcggcgtgaagttatccgctgacgatatctgggagcgctgtgcgtatgtgctctccgtgaaaatgcaggatccgcagtttgccggtcagaccaaagaacgtctctcatcacgccagtgcgcggcatttgtcagcggtgtggtgaaggatgcattcagtctgtggctcaaccagaacgtacaggcagcggaacagctggcggaaatggcgattgccagcgcccagcgccgtctgcgggccgcgaaaaaagtggtgcgcaaaaagctgacgtcaggtccggcgctgccggggaaactggcggactgttcatcccaggatctgaatcagaccgaactgtttctggtggaaggggactcggcgggcggttcagccaagcaggcgcgtgaccgcgaattccaggccatcatgccgctgcgcggtaagatactgaatacctgggaagtgtcgtctgatgaagtgctggcatctcaggaagtgcatgatatttccgtggctatcggtatcgatccggacagcgacgatttaagcaccctgcgttatggcaaaatctgtatcctcgcggatgcggactcggacgggctgcacatcgccaccctgctgtgtgcgctgtttgtgcgtcacttcccggcgctggtgaaagccggtcatgtctatatggctatgccgccgctctatcgtatcgacctcggcaaagaggtgcattacgccctcgatgagagcgagaaaaatgcaattctggataaattaagccgcaagcgcggcaaaccgaatgtgcagcgttttaaagggctgggggaaatgaaccccggccagttgcgtgaaacgaccctggatccgaatacccggcgtctggtacagctcactatcagtgaggaaaactatcaggaaacgatgtcggtgatggatatgctcctcggcaagaaacgtgcggaagaccgccgtaactggctgcaggaaaagggtgatcgggtggaattggatgtgtgatgtcaccccgtgacggcacaaaaggtcagaggaacagagtgaatgagtgaaataactcatgacggtgtggagcgccaggcgcttcataattttacagagaatgcctacctcaactattccatgtacgtcatcatggacagggcactcccttttatcggcgacgggttaaaaccagttcagcggcgtatcgtgtatgccatgtctgaactggggttaagcaactccgccaaatacaaaaaatctgcccgtaccgtcggtgacgtgctgggtaaataccatccgcacggcgacagcgcctgctatgaggcgatggtactgatggcgcagccgttctcttaccgctacccgctggtggacggtcaggggaactggggggcaccggatgatccgaaatccttcgccgccatgcgttataccgaatcgcgcctgtcaaaatatgcggaagtgctgctcagtgaactgggacacggcaccgcagactgggtgccgaactttgacggcaccatgcaggagccgaaaatgttaccggcgcgtctgccgaacattctgctcaacggcaccaccgggattgcggtcggtatggcgacggatattccgccgcacaatgcccgtgaagtgaccggtgcactgctggcgctgattgacaagccgtctctgtctctcgaagaggtgatggcgtttatccccggccctgattatccgacagaagcggaaatcatcaccggaccggaggatatccgtaaaatctataaatccggccgtggctctgtgcgtatgcgcgcggtgtggacaactgaggacggtaatgcggtgatcaccgcgctgccgcatcaggtttccggcgcgaaagtgctggagcagatagctgcacagatgcgggcgaaaaaactgccgatggtggaagatctgcgcgatgagtcggatcatgaaaacccgacccggctggtggttgtgccgcgcagtaaccggatcgatcttgatcaggtgatgactcacctgttcgcgaccacggatctggaaagaagctaccgtatcaacctgaatatgatcggtctggacggacgtccggcggttaaagggctggttgagatcctcaatgagtggctggtttaccgccgcgaaacggtgcgccgccgcctgaatcaccggctggaaaaagtactgcgccgtctgcatattcttgacggtttgctgctcgcgtatctcaacattgatgaagtgattgaaatcatccgttcggaagatgagccgaaaccggtactgatggatcgtttcgggctgagtgatactcaggcggaagccatcctcgaactgaaattacgccatttagccaaactcgaagagatgaaaatccgtggcgagcaggatgagctggccaaagagcgtgataaattacaggctattctcggctctgagcggcgtatgaacacgctgctgaaaaaagagcttgaggaagacgctaaacagtacggtgacgatcgccgctccccgctcaacgagcgcgaagaggcgaaagccatgagcgagcatgacattctgccgtccgaaccggtgacggttgtgctgtcacagatgggctgggtgcgcagcgccaaaggccatgatatcgacccgtccggcatgaactacaaagcgggtgataccttccttggcgcggcacggggcaaaagtaatcagccggtggtattccttgattccaccgggcgcagttattcgctcgatccgctggaactgccgggtgcccgtggtcagggcgagccgctgaccggcaaactgacaccgccgccgggtgccgtgtttgaacaggtactgatgaacgatgaaaatcagaagtacctgatggcctcggatgctggttacggctttatctgtacattcagtgacctggtcgcgaaaaacaaagccgggaaagtactgatcacgctgccggataacgcgaaagtcatgacgccgattgaggtgaatgacgaggaaaacgaccttctgctggcagtatcgcaggaagggcggatgctgctgttccctgtcggtgacctgccgcagctgtcaaaagggaaggggaacaaaattatctccattacctctgcggcggccgtagccggggaggacggtctggcacatctgtttgtgatccgcccggatgccagtgtgacactgcatttcggtaagcgtaaactgatgctgcgtccggaagatctgcagaaattccgtgctgagcgcggacgccgtggtacggcactgccgcgcggcatgcagaaaaagatcgaacggattgatatttctgtaccggagccgaaggcgtaatatccggtattaacagcgatactattcacggggcaatgattgccccgcttttcttaaaaggccattttgcgggggacgcatgttagccattttacgtatcatcatcgttattttttattgtattttcggtagtctggccggcattcttatctgcctgaccagcccgcgtaacccgaagcatgtgatgactttcggccgcatgtacggcaagctttctcatgttttcggcatcaaaatggtgtaccgcattccggaagaagcgaaacactacggttcctgtgtgtatgtgggcaaccaccagaacaactatgacatgatcaccatgtcgaatgcggtgcagccgcgcacggtgactgtcggtaaacgcagcctgatttggatcccgtttttcgggcagctgtactggatttcggggaatatcctgattgaccggagcaaccgcagcaaggcccataacaccattacccaggtggcggatcagatcaaaaaacgcaatatctctgtctggatgttcccggaaggcacgcgcagccggggccgcggtatgctgccgtttaaaaccggtgctttccacgcggcaatggccgccggtgtgccggtggtgccggtatgtgtgtccaccactcaggggcgcattaaactgaaccgctggaataacggtgtggtgattgtggaaatgctgccgccggttgatacctcaaaatatacccgagaacaggtgcgtgaactggctgaagattgccgccagatgatgatcaaacgtatcgcggagctggataaggaagtggttgaaatggaaaaacaaaagggccgtaaagacgcttgatttccgtgactgtcacgtcggttatacaataccagccttattattttgcaacttatcatagataagtttaggaattgctcttcatccgctatatcatacgcttaacactccgttgttaagcgtatgcccttcatgaaacgataacacggatgtctctgtctgctcaccggcatacgggtgttcggcacaaatcataaaaatcatggaaacgtttttttcggagatgctatgaccctgagtcggcgccggtttattcaagcatccggcttagctgtgtgtttaggctcactgcctctgtctgtccgcgcggcagatgagggcggcagtcagccgttacctgttccgccattgctggaaagccgcaacggacagccgttatttctgacgatgcagcgtacacactggtcatttaacggtaaaactcaggccagtgtctggggctttaacggccgttatctcgggccgactgtccgcgtccgtaatggcgatgacatcaaaatgatttacagcaaccgcctgtcagagccggttgcggtcaatgtcagcgggctgctggtgccgggaacggttgccggtggtgctgcgcgtctgatttcaccaaatacagactggtcgccggtgatcccggtgcgccagccggctgcaacctgctggtatcacgccaatactccgaaccggatggcaccgcacgtttataacgggctcgccggtatgtggattgtggatgatgaggaaagccgtaatctgccgttgccgaaagagtacggcgtcaatgatttcccgctgatcattcaggataaacgcctggattccttcggttcaccggagtaccgcacagaaagtgacggtatgtttatcggtgaccggctgatcgtcaacggtgcggaagatccgtatctggaagtgtcgaaaggctggatccggctgcgcatggttaatgccgcaaacgcccgccgctttgaactgaaactcagtgacggccgtccgttctatatgattgcctctgatcaggggctgctgccgtcaccagtggcggttgaggtgctgtccctgtcaccgggtgaacggcgtgaagtgctgatcgatatgtcaaaaacagaaacactgactatcacggccggggaatctgctactctgacagagcgttttaaaagtctgtttgagacatcaaacacactggtgaataccaatgtgctgactatccgcgcaaccggcctgatctcgctggtaacggataatttaccaaccaccctgattcaggatccgacacagatcacgaccggtgtccgtaaccgcgatgtgtcactcagtttgtcaccgccggggattaacggcgcgatgtgggatatgagccgaaccgatatccgcacacagcagggcaactgggagcgctgggttgtcacaaccgatactccgcagccgttccatatcagcggtgtccgctttaaggtgatcaaccataacggccagtcaccgcagccgcaggattacggctggaaagacactgtctggattgacgggcgcagtgaattgctggtgcagatgatgcagccatcgtattctcacttcccgttcttctattacagccagttcctggagcaggcggacagaggggttaccgggcagctggaaatcgagccgtcttctcagtattaaaataccggatataaaaaaaccgctgaataatcagcggttttttatggtttctcagcggctcagcagccgtttttcctcatcccgcagccagcgggagaatgtcccggcaaccgcgataaactgaatgatgccggtatccggttcttcggtctgccccagcaggaaggtgatcgcgtggcgcttttccggatacagtgctatggcttttccggccatctgcggcagcggcagcgggtaagtgcaggtttcataatcattccacaccagggcggtggcacgcagcagacgccgcgcagtttcccgttttatccgccggatctcagtcagcggcgggcttttctgtaactgcatcaggttggtacggacgagtaccggaaaatcaccgttaatgccgtgtataatctcacggttcagtgtcacgacaggcagtttcagtgtcaggtcatcaccccagaccggcaggcaaaagtgtgccagccagtaagcccagaccggctgttcttccgcagaggtcacttctgacagcaggccggtatcaaacccgatttttgacacactgctgtgacgcgcggtcagtgctttgtccagacaacggagaatggttttttccgccgcactgagcggccggtgcaaaaccagggtcagatccagatcagagcgccccgggacagcgcggccttcagccacactgccgtaaacatagatgctgtgcagaatacccggcagtgcagtacacagggactgtactgcatcctgtatcacattctgaaattccggctgaaaagtgtatttatctgttttcattatcataatcatcagctcattgcgacccggacgccaaagccaatcaggacgacgccaaggaccttatcgatatatttctgaattttcgccaatccgtggcgtaccggagcactctgaatcagcagtaccagcgatggccagtaaaccaccgccagtcccatcacaatagcagcataccagagtttttcaccaaatccggaattgatatccagtacctgggtaaaaatagcaaggaaaaagagtgtggctttcgggttcagcaggttgcagaggaatccctgcataaaggctttcttataagaaatgcgctgatgtgagccgtccccggtatcaagggtatgtccggcacgtgccagcaggctgttgatccctatccagataaggtaagccgccccggcatatttgaggatcataaacagccacggtgtggtggtgatgatcactgcaagcccggccacgcagtaggtcatgtgaatggcgatcgcagacagcacgcccaatgcggtcatcatggcggcggcacgctggtaacgggctgcgtttttcacaatcagaaagaagtccgggcccggggagatcataccgagcgcagcgatggtggtgaccatcagagtggcgtcatacatgtggtatatccttgctgaaaaagacctgaatgcagagtaaaagtatgactcaccttcaagtgtgaagacaaataaattatttgtattgatgaaacactgaattcagtcgacggcattgagtagtttacgtatagtgacggcaaaatttctctcagccctaaggtgaaatgaatgaacattagcttgatcgctgctttagctatggatcgggttattggcatggaaaatgcgatgccatggacactgccggaagacctggcatggtttaaacgtaatacggtgaataaaccggtgatcatgggtcgtgtgacttatgaatctatcggccgccctctgccggatcgcctcaatatcgtgctcagccgtacgccgggcaacgatgatcgcgtggtctgggcgaagtctgtggaagaagcactggcgattgcacagaaagaaacagacggcgagatcatggtgatgggcggcggtaaagtctacggacaattcctgccgctggcggatcgtttatatctgacacacgttgatgcggaagtcagcggggatacttacttccctgactatgagccggatgagtgggactccacttttatggaatatcatgacgcggatgaagcaaactctcacggtttctgctttgaaatcttagagcgccgtaagagctgattaatcagttgattcgtattatttcataaataatgctgatataaaaaaagcagagccaccggctctgcttttttcttgtctgttaccggtggccggtcagtcatcatcctcatcccgcaccgcaaaagactcctgccagaaatagcagcgatcttcccagcgcagcatggtgagttgtccgccccagcagcagccggtatccagtgcatagataccgcgtggtgctcctttgccttccagtgacgcccagtgaccaaaggccacactgtagccttccggcagttttgacggcagggcaaaccagggtttcagcggcgcggaaacctgatcaggtttatctttgcagaccatatccagctgtccgcccgggaaacagtaacgcatccgggtcagggcattggtggaaaaacgcagacgcggcaggccggtgagggaaggtgaccagtcattcggcaggtcaccatacatagcattaatgaacagcggataggtatcactgctgagaaccgcttccacttcacgggcacacagaatggcggtatccagatcccactgcggggtgatccccgcgtgtgccatgaccagttttttctcatgatcaacctgcaacatcggctgacggcgcaaccagttgatcagctcatccagatccggcgcgctgagcagtttgttcagatgatcgcgcggtttgttacggctgatccctgcgtagatccccagcagatgcagatcatgattgccgagtaccaacctgacgcagtcacccaggcttttgacatagcggaggacatccagtgaatccgggccgcgggcgaccagatcgccggtcagccacagggtatctgcctggggatcaaaatcagcctgagccagtaatgcgcgaagttcatggtaacagccatgaacatcgccgataagataggttgccatagaaaatcagtgaataaaggttggtattgcgagccggaaaacagggatctcactgatgaaatccgcaccctcgtgatccaccatagtgtaataaccttccatggtgcccagcggtgtttccagaactgtgccgctggtataacgatactcttcaccgggccggatcaccggctgttcaccgatgacaccttccccctgaacttctgtctggcggccttcactgttggtgatgcgccagtagcggctgataagctgcacaggatcacgacccaggttacggatagaaacggtatacgcgaaaacatagcgttccgcatccggttcagactgactttcgatataaacactctgaacctgaatacaaattctcgggtcgttattcatgatgaatcccctatgaggcgggatgttccgccaggtaattggccatcagacagtattgcgcaacactgatattttctgcacgggtggccggatcaatacccagctcagtcagggtttccggactgaacagatcacctaagctgttgcggatcgttttgcggcgctggttaaaggcctgcgtggtcacacggctgagcagcgcgacatctttcagcacatacggattttcgcggtgcgggatcagacggacaaccgctgaatccacttttggtgccgggcggaatgccgtcggcggcacatccagaaccggaacgacctggcagtaatactgtgccatgacactcagacggccgtatgttttgctgcccggaccggcaaccagacggttaaccacttctttttgcagcataaagttcatgtcactgattgcgttagtgaacgtgaacagatggaacatcagcggcgtggagatattgtacggcaggttaccgaacacccgcagcggctggccgcgttcctgtgccagtgccgtgaaatccacggtcatggcatcctgctgaataatggtcagtttgctttgtaaaaacggatggctggccagacgagcggccagatcacggtcaatttcaatgaccgtcattttgtccatgcgatcggcgaccggctcagtcagtgcagccagtcccggcccgatttcaacaatcgcctggccgggttgcgggttaatcgacgcgacaatgctgtcgataataaattgatcggttaagaagttctgcccgaaacgtttacgggcaaaatgcccctgatggactcgtgtattcattgactgtttttaatcattgtaatcgctaaatttaatgcggtgataaagctacccacatctgctttgccggtacctgccagttccagggctgtgccgtggtcgacagaggtccggataaacggcagtcccagcgtgatattcacggcacggccgaatccctgatattttagcacaggcaggccctgatcgtgatacatggcgagcacggcatccgcacgctccaggtatttcggctggaacagggtgtctgccggcagcggaccttccagggaaatcccctgcgcccgcagctcatcgagtgccgggataatggtgtctatctcttcatgccccatatggccgccttcccccgcatgcgggttcagaccgcagacgatgatatgtggctgcgcgataccgaatttggtgcgcaggtcatgattgaggatagtgatcacttcatgcaggcaggtgcggtcaacggctgcaggcacctgtaaaatcggcagatgcgtggtcgccagcgccacccgcatttcttcggtggccagcatcatcaccacacgtttgcagtgactgcggtcggcaaaaaattctgtgtggccgataaacgggatcccggcatcgttaatgatgcctttgtgcaccggacctgtaatcaaagcaccaaattcaccctgtaaacagccgtcacaggcacgagccagtgtttcggtcacataagcggcatttgccacgttgagctcaccggcgacagccggcgctttcagttcaacaggcagaatagtcagtgtgccggcacgctgcggctgacaggcggtatccggtgaataaggttcaagggtgagcggcagtgacagggcgtgtgcgcgttgctgcatcagttgcgggtcagcacagaccaccagttttaccggccagtcgcgctgtgccagcgcgactgtcaggtcaggaccaaccccggcaggttcgccgggggtaataacgacaggtttcagcttatttgttactgccatctaaaatttccacgtaagcgccggcgcgctgttcctgcatccagctctgtaattcttcgctgaatttacggttaaacagcatacggtaagcgcgatctttctgagccgcttcggtcttatccacgttgcgggtatcttcaagctggatcaggtgccagccgaaagaggagcggacaggctgactcagttcgccttttttcagtttcatcagtgcgtcgcggaaagccgggtcgtagatatcaggcattgaccagcctaactcaccaccacgcagggcagagcccggatcttctgagaattgttttgccgcagcatcaaaggaggttttaccgcttttcacatcagcggcaatctgctgcagtttgctgcgggcctggtcatcggtcatcaccggtgacggtttgatcagaatgtgacgggctttcacttcagtcacagaaatcggctggctgtttccgcggacttcattcacgcgcagaatatggaagccgacaccggagcgaaccggcccgacaatctcaccgcttttggctgtctgaaggcgctcggcaaacagacccggcagctcctgtaaacggctccagcccatattaccgcctttcagcgcctgcggatccgcagaataggtgatcgccagtttaccgaaatcggcaccatgctgaagttcattcataatggtggtgactttttcttttgctgcattcatctgctcttctgtcgggttttccggcagcgggatcaggatgtggctgatgttcagttcagtatccgcagcgttttgcgtgctgataaggtttgccagagaatcaacttcctgcggcaggatcaccacacggcggcggacttcgttgttacggacttccgccatcatcatttctttgcggatatcgctgcggtatttgtcatagctcatgccgtcgcgtttcagacgatctttcatctgggcaagggtcatgttgttctgacgggcgatatcttcgatagcgccgtcaaccgcctggtcagggatagagatctgcatctgtccggccatctgcatcacgatattgtccatgataagacgttcaagaatctgctgacgtaatgttgcctgatccggaatctgctgaccggcattgcgggcattcatggtgacagtctgaagcatattattgacatcactctccagaaccacaccgttattcacgactgccgcaactttatcaagctgctgcggtgctgcgaatgaggttgtgcttgccgtgaacatcaggccgagaatgagtgttctccagtttttcataagtatcccatcatgtttcgtatcgccgtaccgccggtacggcatgtgaaaattgtgtcagctcaggcggttaaaatgccggaacatacggcagaataccgcgctcaagcattttctggctgcccagactgtaattgctgctcataccgcgtaattcgatattaaacgtgattttattgtcgtactcactggcgtcatttttccagtcgataatcttacgctcgtaaccgacgtttgccgcccagcagcaggtattgtattgcagaccgactaactggctggccggctggctctctttggtgtcatagtaatactgaccgacaaaggcccactgctctgcaaccggccagctggccacgataccgacctgggagatgcctttctggttcgggcgcgtgacatagtcttgaccatactgtgtattttggcgcatggcctggatatagtcccggtccacatagcggtaattcagctgaatcagacgttcggcatcctgacggtattccatcgtggcattggacatggagacgctgcccagacggcggtcatactgaataccgcctttcaggccccagttgtcgttataacgccacatggaatcacccgcccagaccatcgagccggtttcatctttttcatccacaacggtaattttaccggtacgcggacgttcaaagtagtagatttgacccacagaaacgttaaatcgttcaactaattcatcatcataaatccggctggttaccccggtggtgacctggttggcggatgcaatgcgatccagaccactgtacatgcggtcacggaacagaccgctgtagctggactgcatcagtgtggagtcaaagttattgatattgtcctggtttttatacgggacatacaggtattgtgcgcgcggctctaatgtctgggtgaagctgtcattaaagaacatcggccgctcgaagatcatcttcgcatcagctttaaactgcggcagcacccgggtaacatttttttcaagttcggagttcttcagtacttcaggaatatcctgatcataatgggttgccatcagtttcgcttcagtattgaagctggcccagccgttagacagcggcatgctgagtgtcggttccgcatgaatacggacggcatccggattatttttacctacgctggtaaagcgggagacctgaccgtaggcccggaaatcaaataccccgaggtcatttttataataattgagatccaactgcggctcagcacggtaggatgttgcattatcattgttggtcaggatctggaactgtttggcggttacggtggcattccagttcgattttcggatacccacagccagtttttgtgtggcgtagccgtcagtggagttaccgtaagcggaagtgaaatcggtaaaatagcgcgagtcactgactttggtgtagtcagaggagaaccaccagtcctgggcaaatgacccgctgtgaccccagtagaataaccagcggtcattggaatcacgtttcgcccactctgcatcaccggcagcttctttgtctttcttatactgcgagtcatccagcaggaaatcaaaggccagtgtgcctgtaccgaactgtgtcaggtaacggaattcattatccattttcaggccgcgtttactgaaatagtgcggcgtgatagtggcatcgtaattcggggcgatattccagtaatacggcagggtaaattccaggccggatgatttggaatagctgccgttcgggatcagaaaaccggagcggcgtttatcaccgatcggtaactggaggtacgggctgtagaagatcgggacattggcgacacggaaacgggcgttccagatttccgcaacctgctcttcctggtcaataatgacctcagagcctttgacgctccagctgtcattgcccggcaggcaagaggtaaagaccccgttttcgaggatggtataacggttttcgccgcgaagcttcattttgtcggcatcaccgcggccctgacggccgaccatctggtaatcgcctttctcaacatcagcatcattgttattgagattcagccacgctttcggccctttcagacggatttgcggatcagaatagcggacatcaccagtcgctgtcgcaatacggacagggttggtttcttcaccgctctgggtaacttcgacttcatccgctttcagattctggttacctgagcggatatcaacgccaccatcatattttaccgcgtgcggatattcgcctgacacaccttgtgcagtgatattgaccggaaaatcgccgggtttaccgtcaacaaccggttcgtcatacaccggaacacccagcatacattgctcggcaagtgtggcggcttgtgcagcctgactgtataacgctgcccagataatggtggccagcagggttggataactcttcttcataagtatgtctgcaattccgtcctcggtagcacattgcccgaacgccaaaagcctaatttacacgaaaaaagagcgcgcgtgaaacaggttcacgtatccaaatggcgttaggcatcgtacagaatgggtagtatgataatgcaaaattgcgccaagggcattgttgaattgaggagtatatgcactatttgggaaaaatcatcggaattttattaggcatggcgtcaggggccggtttttggggtatttttctcggctttcttattggtcatgcgattgataaagtccgcagtcagcaattgggtggctcattcagcaacaatcagtccagacaggcactctttttcagtacaacctttcagattctggggcatctgaccaaatcaaaaggccgggtaacggagtcagacatttatctggccaccgccctgatggatcgcatgcagttgcacggcagtgcacggactcaggctcagaatgctttccgtgaaggtaaagcggccggtttcccgctgcgcgatgcactgcgccagttacgccgcgcctgttacgggcgggcggatttactgcgcatgtttctggaaatccagatccaggcggcgtttggtgacggggagctgcatccgaatgaacgccaggtactcctggtgatcgccgaagagctggggatcccgcgtcatcagtttgaaaatgtactggcaatgatgcaggcgcagatgcacggcggggcacagagcggtaattggcagcagcagtctcagcagggttattaccgcgatcagaccgcagaccttgccgccgcttaccgggtgctgggcgtgaaagaaagcgacgacagtactgtcatcaaacgcgcctaccgcaagctgatgagtgaacatcacccggataaactggtggcgaagggattaccaccggaaatgatggagctggcgaaagagaaagcgcaatctatccaggcagcatatgatctcattaaaaaagagaaaggctttaaataatcccgtttaataccgttttaaaggtgtaaaacatgttgccgggaaagtgcagggcggatcatattcttttcatataattgctataaaatataaatgcagttgaaaaattacgtaaatattttattaaatatgttaaggatatgatccatggccaatacccgtgttcttatcggagtagcgggattagcactttgcctgattcttgcctcaatgaattcggtgaccgtgttaatccactaaaaatctgatttacaagtaaaatgcatcggcttgccgtttgccggatgtgtgacagacagcgcctctgcatgaagctgcagccggggcgctgcggctcttgcttcatcgtgtgcataaaaacggtcccccagaatcgggtgtcccagtgccagcatatgcacccgcaactgatgcgaacgcccggtaaccggaaacagtcttacccgcgtggcattttcctcatattccagcacttcataacctgtctgagccggtttgccggtttcaaaacacactttctgtttcggccggttcggccagtcacaaatcagcggtaaatccaccatgccggtttccggctccagatgtccccagatacgggcaacataggtttttttcggttcccgttcgcggaactgccgtttaagctcccgctcggcggctttggtcagcgcaaccacaataataccgctggttgccatatccagacgatgaacagattctgcggcaggataatcacgctgaatgcgtgtcatcacactgtctttatgttcgggcgcacggccgggtacggaaagcagtccgcttggtttattcaccacaatgatactttcatcctgccagaggatgtgcagccagggatcggcaggcgggttatagggttccattagcatgggatcaccaaatcagagacccggcagacattctctgccgggatacaggttactgatgcgaaacgacaatcagccggatagcatccaggcgccagttggcatcatccagatgtgacaggatttgctgacgttcttcttcaatggcatcaagctcgtcatcacggatgttcgggttaaccgatttcagtgccagcaggcggtcgtgttccagagtaaggtgctgatcagccattgctttcgctgcggtaatcagctcacgggcctgaccggcaacaacgtcttcagacagacgcagcacctgatgcacctcattttgcaccgcattgacaaacttactgccggtatggcggtttacggcattcagctggcggttaaagctttcaaactccacctgagatgccagattattgcctttcacatccatcagcagacgcaccggtgtcggcggcaggaagcgggtcagctgcagattcttcggagcctgtgcttccaccacataaatcagctctgtcagcagtgtgccgaccggcagggctttgtttttcagcacggagaccgcacagctgccggtatcaccggacaggaccaggtccagaccgttgcggataatcgggtgttcccagctgataaactgtgtgtcttcgcgggacaatgcctgttcacgcttaaaggtgatggtgcagccgtcttccggcagacccggaaaatccggcaccagcatgtggtcagacggagtcagggctatcatgttatcgctgcggtcatcctgattgatgccgacaatatcaaacagattcagggcaaaggtgaccagttcggtatcttcatcctgatccgcaatttcagcagccagctcattaccggcttcgccgccgttggaatgcatctccagaaggcggtcacggccctgttccagctgttgtttcagtacatcatgggtcttccggcattccgcgataaattcatcaaaaccactgagatccgccgggtttgccatcaggttaatcagtctgtcgtaatagcggtcatagatggttcggccggtcggacaggtatattcaaaggcttccagaccttcgtggaaccagcgcagcagtacggcctgtgcggtattttccagatacggaatactgatctgaatatcgcgtttctgaccgatacggtcgaggcgcccgatacgctgctccagcagatccgggttaaacggcagatcgaacatcaccagctgattggcaaactggaagttacgcccttcagaaccgatttcagagcagagcagcacctgtgcgccttcctcttcggaggcaaagtaggccgccgcccggtcgcgttccagcagggacatattttcatggaaaaccgcagcgtggatgccttcgcgctcgcgcagaacctgctccagctgcagagcagttgcggcctgagcgcagattaccagcactttttcgttgcggtttgccagcaggaagccgagaagccattcaacacgcgggtcgaagttccaccaggtggcgttttcgccttcaaattcctgataaatctgctccggatagagcatttcacgggctttgatttcagtggtttttttgctgcccatgatcccggcgactttaatcgcggtctgatactgtgccggcagcggcattttaatggctttcagttcgcggcgcgggaagcctttcacaccgttgcgggtgttgcggaacagcaggcggctggtgccgtgtctgtccatcagcatgctgataagctcgcgacgggcattttcgccgtcttcactgtcggtattggcggctttcagcagcggctcaatatcctgttcggcgatcaggtcatgaatggcattttgctgatctttggtcagcggtgcgcggtcgagcagcagagtgaccgcatcggcaaccggctgatatttttgctgttcggcaacaaaggtttcgaaatcatggaaacggttcgggtccagcaggcgcagacgcgcaaagtggctctccatgcccagctgttccggagtggcggtcagcaggagtacagacggaatgctttctgccagggtttcaatcacctgatactcacggcttggcgcttcttcgctccagaccagatggtgtgcttcatccaccaccagcatatcccagccggcttcagccaggtgttcaaaacgcggcttgctcttgcggacaaaatccagcgagcataataccagctgttcggtctcaaacgggttgtcactctcgtgctgtgcttcggtgtagcggctgtcatcgaacagagaaaaccgcagattgaaacggcgcagcatttccaccagccattggtactgaaggctttccggtacgataatcagcacacgctcggcgcgtccggccattaactgctggtggataatcatcccggcttcaatggttttacccaggcccacttcgtccgccagcagaacacgcggcgcgtggcgtttaccgacttcattggcgataaacaactgatgcgggatcagactggcgcggatgccgcgcaggccgctggtggcacggcggtactcttcactcaggaatttgcgggcacggtagcgcagcgcaaagcgatccatacggtcaatctgaccggcaaacaggcgatcctgaggtttattaaatgtcagtttactgtcgagaaacacttcgcgcaggcggacattgtcctcaccggtatcggtacgctgcccggtataggttaataatccgtcgctctcttcaacggcggtcacactgagctgccagccttcgtgactggtaacggtatccccttcgttgaacatcacacgggtgataggggcatcggctgcggcatagagacggttttcaccggtggcagggaaaagaagggtgatcatccgggcgtcgacagatacaactgtacctaatcccagctcgctttcagtatcgcttatccagcgttgaccaagagtaaacggcatatttttggctcgattctgttattcagggctaattagaaaaatgctgtggacatcattaccggtgatacaaaaacggcattgtattcaccgggaaaaacaccggcagtcagaacagcagcgtcagctgcatcactctgctccggcgttaaaagcagtaaaggggcgctatgttaatccattagatccgcatcgtcacctgtaaaatggcaaaattaaaatggcatcaataattgcccggttaacaaggtggtgaagtcatcctccaggaaaggcaggatggcgtcggctatcggcatcagttgcttattaatgtaatgctcatagtccggcggagccgtcagaatctccagcggctgcggtccggaacgggtaatgatatagcttatccccgcaccgcgctggtactgcggcggacgattcatgcggacattatactcatccgccattctggccgctttgacatgaggcggcacattacgctgataatccgccagcgggcggcgcaggcgcttgcgatacaccagccggtcatcgtagcggcctgcgagtgtgtcgcggacataatcacggataaactgctgatacggcattttatcgaaaatcagccggtacagagtttgctggaaatgctgtgccagtggtgtccagtcactgcggaccgtctccagcccgcgaaagaccattttatcccccgaaagccccgcataccgtttcttgctgccgaggtctgttccgcggatcgtcggcatcagaaagcggcgatagtgggtttcatactcaatttccagggcggaggtcagcccgtattcatcttttaaatgtgtctgccaccattgattgatctcttccaccagccagtgtccgatacgttccgcatccgcttcactgtgcgcacttttcagccagacaaaggtggaatcggtatcgccgtaaatgacctgataacccagagactcaataatagtgcgggttttgcgcatgatgtcatgtccgcgcatggtgacggaggaggtcaggcgcggatcataaaaacggcatccggcggcacccagaacaccacaaaacgcattcataataattttcagtgcctgcgacagcggcttatcccctgccagttttgccatgtcccgctcatgccagattcggttgacgatatccggcaggcagttggtttccctggaaaaatacgcgcccttaaacccgggaaccgcctgttccggtgcggcaagaccttcgaccatgccaatcggatcgatgagaaaagtgcggataatggaggggtacaggcttttaaaatccagcaccaccaccgagtcatataatcccggggcagaatccatcacaaagccgcccggtatcggctcaccgggtttctcgccggggtcgggtgcgacatagcctttacggtgcatcggcggcagataaagatgggtgaaggcggcgacagaaccccccatgcgatccggtgccaggccggttacggcagcccgcgccagtaaaaattctgtcagatgggtgtgctcaaaaatccgggtgaccagacggcagtcctgaaggttataccgtgccagcgccggtttatcctcacggaaacggcggttgatttcatccatgcggtcatacggggaatcgctgtctttgccctcgccgagcagtgtctgagacacggcctccagactgaaagacgggaactgccaggtcgcggctttcagggcatcgataccgtcaataatcagccgccccggagcaccggcaaaaaattgtccgggtttgaagccgtgctcccgccaggaaagcggggcattattacggccgaaaatcagcgggatctgatatttttccgcatggcgctgcagaatgcgcagatcaaactggatcaggctccagccgattatcatgtccggatcatgttccgccagccactggttcagacggtgaagcagatccgggcggcgcgggacatactccagcgtgaaatcaggattggtcagcggtgtgccgttctccgggccgagcataaaaacagtatcagcaccgcaaccggagagcccgatggagtaaagatcaccgaactccgtggtttcgatatccagagaaacgattttcagcgccgggcggtaatccggatgcggtttcatcagcacatgaccatccggctgtggctgcacccagacagcggcggtgataaaacgctccatcagatagcgctcgcaggggcggatatccgcttcataaaggtgcagatgctgttcgccgagctgtttttccagttgctgtaactggcggtactggcggcagtaaacggcactgacatcatcctgatgaaaatcctttagcggaggtgctgtcagtgtggcgccgggaatgttgttaatgaagggacggctttccgccagctcccggtgcgggacaaagccgacagcctgctgcagcggaacagaaacatgccgtggcccgttatctgtcgccagccagtaacggacctcaataccgcgcggggtatcagaccagtgacgggtcagaataaaaccggcttccgccggtgctgccacctgacgggagggaaaactgttgtgccctgccatcattttgtccgttctgctgatgaaaaaataactatagcagagtggtgtggatatatacagtatttaaggtgcggtttacggacggataccgaggatctgagcctggggaacctcaccgctgaccagggcggcggtactgccgtcaaaggcaatggtaccgttatccaccaccatcgcgcggggcgcgattctggccgcgtcatctgtattgtgggagaccatcatcagtgtcagctgccgtgaatcacagatggtttccagcagtgccagcatttcattgcgcagtgccggatccagtgcggagaaaggttcatccagcagcaaaaccggctgggaacgcaccaggcaccgtgccagtgccacccgctggcgctgaccgccggaaagctgtgatggcagccgtttcagcagtggtgtcagcgaaacctgttcagcgatctgttccagctgcactttttgcgccgcattcagtttcataccgggatgaaaaccgagggcgatattctgttccgccgtcaggtgagcaaacaggttattttcctgaaacagcatggataccgggcgtgaagcgggcggtgtgcgggtgtgatcttcattattcagcaaaatagtaccgctttcggcaaactgaaacccggcaatcagtgacagcagggtacttttacccgccccgctcgggccgagaatggcaattttttctcctgcggcaacggaaaaatgaaaattcatggtctgttgctgatagcggtaaagaatatgatcaaaattaatcatgggcgtttccccggcagacgttccagaacggtaaacagcccgaaacagagtaaaaacaggagcagcgcagtgaccgcggcatccgcattgcggtaagcgccgatctgctgataaagatagaacggcagtgtgcggaaatcttcattgccgaaaagggctatcacaccaaaatccccgaccgacagcacactggcaaatgccactgcctgtgccagcgggttacggagagccttcagttcaatcagtttcagccggttgaagccgctgatattcagcgagagacagagcgggttatagcgttcagccaggtcacgcatcgggttatccagcactttcagtgcatacggaatcgccatcagcgcgttggtcaggatcaccagcccgtatggaattgctcccaaatcagtggtgccggtcgtgctgttgagcagcaggaaaaacccggtagccagtacaattcccggcatggcgaggatcaccagcccggaaagctccatggcctgtcctgctctgaccgcctgccgcagccgcagttcacggctgctccataacagcatcatggtcagcagcacacagataaaaccggaagccagcgcaattccgagcgaggtgaaaaatgcccgccacagtgccggttgctgcaggaccggcagtaatcccggattcagaccgtccgcgatgatggcaaaaaacggcggcagcagaaacagcagggcacagaggatgatcaggccgtcagccagtctgcgcggcagcgtgtcctgcgggttgcgccattgcagtgactgggtaaagccgacagaaaaatgaccggacaaatgctggctgacgagcaccagcccgatgcagcacaccagctggatcagcgccagcagggcagcgcggccaatatcaaagtcataattcagtgcctgataaatcgccagttcaatggtagttgccgccgggccgccaccgagtgccagcaccgtggcaaaactggcaaagcagagcataaaaatcagtgcggcggtcggcagcaactgacggcgcagataaggccactccacaatccggaaatgctgccattcattcatattaagctgagcggcgagctgtctctgctccgtggcaatattatcgagctgctgatacagcatccgggtggcaagcggcatattgaagaagatgtgcgccagcagaatgccctgtaatccgtacggggagaaggtatagtccagatccagaaaaccggaaatatgtgccagccagccgttacgtccgtaaactgacagaataccgaatacggctaccagcacgggcagtaccagcgtcatcgcgcataaccgcagaaagaccgtccgtcccgggaaacggcggcgccagagtgcccgggccaggaaaacagccgggataacggaaaagagtgcggataagaaagcctgccagaaggtaaagcggacgacatgccacaggtagctgtcatcccatatctgctgccagtctgtatccggtgtgttaaaccacagcgccccgaaggcactgacagtaacgaccagaagaagaccggacgcgagtgcgcccggtatcaggtacgcggcaattaacggctgactgcgttttgccatatccgtatccactgattgcgctctttcgccacttcttttgcatcaaattccagcgttttcgccggtttcggcattttgtcgtaaaccggcggcagcggcatatcaatcacaggatacatccagttggtggtcggcagcgttttctggaaatccggtgtcagcataaactgcatgaactgttccgccagtgccgggtgttttgaggaggccagtacacctgccatttccacctgaagataatgtccttcctcaaacagtgctgcggcatagttatctttgttatctgccagcatgtggtaaccaggcgaagaggtataactcagtaccaggtcagcttcacctttcaggaacaggccgtaagattcactccagcctttggtgaccgtcagggtcttgttcgccattttggcccactgtgccgccacatcatccccgtagagtttttccatccacagcagtaatcccagtcccggtgtgctggtgcgcggatcctgataaataatggtcagcttctgatcactgttaagcagttctttcatgcttttcggcgggttcggcagggtgtctttgttgtagataaaagcaaaccagccatagtcataaggaataaaggttttgctttcccatttgaccggcagcaccagttttgactgatcaacattgctttctttaaacagtccggtatccagagccgcctgcatcaggttgttatccagacctaagatgatatcggcctgtgattttttaccttccatccgcagacggttcagcagcgtcacgccgtcactcagaccgacgagtttcagttcgcagttgcattgcgcttcaaagtttttcttaatttccggccccggtccccactcagcaacaaatgagtcataggtatagacagtcagaaccggcttgctgttatccgcagccgcctggaaagagaacagagcagcaaggccgcctgcgatgatatttctggtcagtttctgtaacactttgcgctcctgtaagggaaggattggcaaaggatctgagtgcagcatgatggcgacaggctgtgctgtcagcagtggcggctcaaatccctacgccggtattaaccggatcaggttcctcgggtgttatctcagcaacaccggccggaaagccggagctgcaccccgttgagagaggaatagtgtagtgtttttctcaggaatttgccactgtccggaaccgttaacgtggcgtgttgtttttcttctgtcagagccggaaatgcggcgggctgaaggattttgagtgcagaggtttaccccatgatgggagtgtgaaacaattggctatctttcagtttttttctgaggtagtcgagtgattgatgatgatggctaccgcccgaatgtcgggattgtaatttgtaataaggaaggccaggttttatgggcccgccgctacggacagcactcgtggcagtttcctcagggaggtatcaatcccggcgaatcaccggaacaggccatgtaccgtgaattgtatgaggaagttggtttaacgcgtaaagatgtgcgtatcctggcggtcacccgcaactggctgcgctacaaattacccaaacgtttggtgcgttgggataccaaaccggtttgtatcggtcagaagcagcgctggtttttacttcagctgctctgcgaggacaaagaggtcaatgtgacccgcagcaagtcgccggaatttgacggctggcgctgggtcacctattggtatcctgttcgtcaggtggtctctttcaaacgtgatgtataccgccgcgtaatgaaagagttttcttccgttgtgatgcctgccaacagcgaagcgacggctgtgcgggcaccgtttccctaccgtcgccggcgccagaattagggggaacggatgctgacgcgtttacgtgaagtgattgaaaaagtggctgccgccgccgatctcgcggaagcgctggagcttctggttaaagaaacctgtcaggcgatgggaacggatgtctgttccatctacctggcagataatcagcatcactgtttttatctgatggcaacgcaggggctgaaaaagccccgcggccgtgctgtcagccttgctttcggcgaaggtgtggtcggtcatgtcggccgccgcgccgagcttatcaatatcgcggatgtccgcgaacaccccggttttaaatatctcccccaggttaaagaagacaacctgcgtgcatttctcggtgcgccggtggtttaccgccgccagttactgggcgtgctggtggttcagcagaaagaaaaacgcctgttcagtgaaacggaagagtcttttattgtcactctggcgatgcagcttgccgtactgctggctcaggcacaaaccaaagggttgttcgggcagtttcgtcagacccggatccaggctattccggtttcttccgggattgtgatggcctatggctgggaagaccgttcacagccggtgcttgagaatgtttctgaagcctcggcactggaccgcgtgcaggagcgtgcccgcctgaataaagcgctggaggatgccacggcagagtgccgccgtatcagcaagcgttttaatgccgcctcacaaaaagagagtgccgctattttcgatctctactcccatctgctgaacgacctgcaactgaaaaaggagttgtacagcattgtggagcagggttttgtggccgaatgggcagtcaaaacggtcattgagcaatttgcgggccggtttgccgggcttcaggacagctatatgcgggagcgggccacggatttgcgtgcactcgggcagcggctgttattccatcttgatgataattttaccggcagcaaccagtggccggaacgctttgtgctggtggctgatgaactgagtgccagcctgctggcagagctgccgcaggaacagcttgccggtgtggtggtgcgtgacggggcaacacattcccattccgccattctggtcagggcgatgggtattccggttatcatgggcgcggatattcagccggagctgttacacaaccgtctgcttatcctcgatggctaccggggcgtggtgtatatcgaaccggagccgctgatagcacaggaattcagccagattattgagcaggagcaggctatcagccaactggccgaggatgagctcagccactcagctgcactgaaaagcggcgaacgggtttccgttcagctgaatgccgggctcagtctgaagtatgagcaaaaaatcgtcaaaagtattgacgggattggcctgtaccgtacggaaataccgtttcttgtgcataatggttttccgtcagaagaagagcagaaagtccgttatcaggatatgctgcaactctttgccgggaaaccggtagtattgcggacactggatatcggtgctgataagcagctgccgtatatgcctatcagcgaggaaaacccgtgtctgggctggcgcggtatccgtgtgatgctggatcagccggagatttttcttatccagttgcgggccatgctgcgggccaatatcgggctgaataatctgaagatattattcccgatgatttccgggcttgcggaggttgaagaggccatccgcctgcttgatcgtgcctgtgaggaagtatcggtactgaccggggaacgggtggaacgtccgccggtaggtgtgatgctggaagtgccgtcattgttgtttatgctgccggagctgaaacaatatattgattttatttctgtcggtacgaatgatttaacccagtatctgctggcggttgaccggaataatacacatgttgcaccattatatgactcgctccatccggcggtcctgcgtatgctgaattttgtccggactgaaaccacccggctggggatcccggtctcggtttgcggggaaatggcggcaaatccgttaggtgcaatgatactgattggtttaggataccgtcagctgagtatgaacgggcggagtatcccgcgtattaagtatctgctgcggcatctggatgccggagtactggagccgctgctggcatcattgctggatgcacagacagcggctgagatccgtgaaaaagcggagctgtttattgagaacaaggggctgggacagcttatccggggtagtgcttaaccggcacatcccggggcataaggtgtttccgtccttacagtcatatatcccggtctgcggcaggcagagctgtaaccgcagccggatacaacacacagtgtgaggtacgatgagtaacacttatctggcatttccggattttgatcctgttattttttctgtggggccggtggcgttacgctggtacgggctgatgtatcttgtcgggtttgtgtttgccatgtggctggccaaccggcgtgcagacaaaccgggcagcggctggaaacgcagtgaagttgaaacactgttatatgccgggtttgtgggggttttcctgggcggccgtatcggctatgtgctgttttataacttcccgctgtttgcagaaaacccgctgtatctgttcaaagtctgggatggcggtatgtcattccacggcggactgatgggcgttattattgctatgtggtggtttgcccgccgcacgaagcgtcattttttacaggttgctgactttgtggcaccgttgattccgtttggtctcggtatggggcgcatcggtaactttattaatggcgaactgtgggggcgtgtgacactcgatacaccgtgggccattctgttcccgacgtcttatagtgaagacgtgaaactggctgctgctgatccgtctctgatgccggtgcttgagcaatacggcgttctgccgcgtcacccgtcgcaactgtatgaaatgctgctggaagggatcgtcctctttattattctgaatgtgtttgtccgtaaatcccgcccgatgggcagtgtgtcaggtctgttcctgatcggctatgggctgttccgtatcattgtggaatttttccgccagccggatgcccagcttggtttattcggcgggatcagcatggggcagattttgtctgtgccgatgattattattggtgtactgatgatggtatgggcatacaaatgcccgggtaataaaaagcagagtaataccggaaaacagaacgcaccggaatagatcaggctttagtgagtaataaaaaactgcatcgtaacggatgcagtttttttatgcgcggctgtttaatggtttctcagacagagaacggatatttaatcgggtcgtggtgctgataatctgtcactgtgaagtcatcggtggttacccatgtcattaaatcatccagcgttttaatgtcagggttaatatgcagtttcggtgatgcaaatggcttacgtgcaatctggacatcacgcattaattccagctgatcttcatataaatgaaggttaaccactttgtgataaaccttaccgcatttcaggccggttatctgagccataatagccagcaggaaataacattgcggcgcattgaaaacataacccagtgcataatcacaactgcgctgataactgtttaaatataatgtgccatcaagaacggagaaatgatgcataaacatgcagggtctcaggcaaccctgattaaattcaccgggattccagaatgaaataatttcaccgcggtcatcaattcctttttttaaattatcatagactttacggagttgatcgaatgtattttttcgcagttcattaatcagtgttttaacaccttctttatctccggaatcatttaatgataataataaatcatactgtgcttctgtcggggatactttcagctgccgtccctgaacaccataaacgcgacccatatcatcctcacctttgcggttcgggtttgccagccagtcggtattttcattggcgttagcgttccaggtattacagccgatggctctgaactgagcggcgctgtcatatccgcgtaagtaacccagcatctctgcaattgcggctttccagaatgccttgcgggtggtcaccagcgggaactcatttttgtcaacgtggtaagtgaaatcggcattaataattgtcaggcatcttttacctgtccgtttattctcaatccatttcccttcctccagaatccgctttgcaatgtctaaatattgttccactttcgttttcctgttgacgcagtatatggtttttatattataacattattttcatttttttaatacaagataatattattttgattttttatcagtattaaatctattaaccatattaataattaagttaatgtttttgttatttataaaaatcattagtggtttttttattctttatctgattatttccggctcaccggtactgatattcaaatacagtaccggcggccggtttttatatcagttaatttccgtattgttaaagagcggtggtgtctgtactttttagcgccttcattttgttcactccacacttttttctctggcagataatttttttccgtacaacacgaaaaatgaatgtgaatttgcagtattccgcagaatttttttcctgttgcatcgcatttttttcggttttgtctttccgggagtggtaaatccgttattttttcggcagagaaaacgaacggatgaatacatgctgacagaacgggggatatcgctgatggaagtcattattgttttatttattatggcattacctgtttcatttattaatatttcatgggaaagccacagagagcggcgttatctgacagaaacggctgcgttgtttcagcaatatctcagcagccataaactgaaagcaacctatctgaacgaaacacggaaaatcgcggttacgtttggtgagaaaagccgggcctgtcatcaggtatccgcagcacggtgtgatgatgatccggaaggattcacaccgatggaaggtgtccggattgtttccggcacgaccggtaccgtattgttctggggaacccggcataccgcctctgctgctagttttttactggaaaatacgcagggacagataaaactgattatctcggccccgggccgtatacggttgtgcacgccggacacgatatccggagtaccgtcatgctgaataaaaggcgggaaaagggttcactgctatttgaaatgctggcgggaatggctgtcagtgcaattcttctggtcacggtcacccgcttttttccggcgctggggcaggatgtactgaacacataccggcaatacaagctggatacgataatgcgggaaacccttttgcggctggaaaaagatctccggcggacggcattctgccggggacactgtcagggcaaaccgctggaaattgccgcccggcgcggcgagacagacggcagttgcatcattgttgcttacgacctcaatcacaatggccgctgggagcggaatgtccgtaaaatcggggagcatttcggctaccgtctgaataagcaggcactggaatggacgcgcgacgcccgcagctgccgggataccggctggcaaaaggtcacggatagccgctatgtgaatgtttcccggtttctggtcacgccggtaaaactgtacggaaaaaatggcctgaaactgaccctgacactcaccggacgggacatgcccttaatacagcgaaccggagaaagcctgattgtcatgcctaattaccacctgtagatccggcggggagaaagccggtcactccggaggcaatgccctgttgctgatgattatgctgttgctggggatctcattgatgatgctgtctgttttacaccgtttttatcagacggagtggcgtaacggtcaggacgaaacggcattttaccgggcggatgccggatcggcttctgcgctggaatggggactgacactggcgtggtcccggaaagcactgaatgaaacaccgttttactgccggacagcacctgatccggaactgaagagttgtttgcggcggctgagagccaacaagctgttattacagggcagcatgttttctcctaggtttaaacaaaatatcacgcattatcagctggtcagtgcccgggaagaaggagacaacatgattttgacagccctgccgcagggatggagtgatttttgcccgccggatttaaaacccggctgcaaccggcatactgaaacgggagaaaacaatgaatgagcgcggtatgtcgttaccggaagtgatgatttgtgcctttatttttgcgattctggttaccggattattacgctattatcagctcctgcacagcggaaaacagcggcaatatgcggatgtcagcacggtacgtcatctgcatcagatgatgcgttttacgtcggatcccgggatattacggcagatgatgcagacacatttatccccccggcagaaatgggaaagttatcaggaaaatgtgtcaccgggctgtatttccgttactatcgggctggtctctctgggagagcgccggttaaccgccggcagatggcaatgtatgtaaggacaggacaatgtttacagtttatcactccaatgatctggatctgctgaaagatctgatatgccatattattgataatgataaaattaatgatcctttttgtcctgaaaccgtgctggtgcaaagcccggggatgtctcagtggctgcaaatcagcctggcagaaaaactgggtattgccgcgaatataacatttccgctgcccgccacatttatctgggatatgtttacccgtgtcctgccggacattccgagggagagtgccttcagtaagggcgcaatgacctggaagctgatgtcactgctgccgcagcgccttgatgatccggattttgccccgctgcgccattatcttgatgatgacggggataaacgcaaactgcatcagctatcgggacgtattgctgatttatttgaccagtatcttgtctaccggccggactggctgacggcgtgggaaaataatgaactgattgacgggctgagccagaaccagtcctggcagaaatgcctgtggcaggatttgcagacactaacccgcagcctggggcagccggaatggcaccgtgccaatctttatcagcgttttattgatgtgctcaatgaaggtgacccggagattgtcgccaatctgccgccccgcctcttcatctgcggtatctccgcattaccgccggtgtatctgcaggctctgcgggcgctcgggcagcatacccatatccatctgatgtttaccaatccctgtcagtattactggggcgatttacagagcccggctgcactgcggcgtatgctggcgcgcaagccgcaaagctattgggataaaaaagctgtcagctggtttaaatcggatgaggatgcaccttcactgttcgattttgaggctgacggggaacagaataccggtaacccgctgctggcatcatgggggcgtcccggccgggataacctgtttttcctggaagatattgaagaaatccatgctattaaagcttttgtcgaccgcccggcagatacactgctgtctgctgttcagcaggatattcttaatctggaagacggcagtgtggtgggaaaaaacaaagaggagtttgtcaccagtgagcggcggcgggtgattgcggataatgaccgctccctgacattccattcctgccacagtccgcagcgggaaacagagattttgcaggactatttactgaacctgttggagaatgatccgtcactgactccccgcgacattattgtgatggtggcggatatcgacagttattctccttatattcaggcggtttttggccagggaaacgaaaaccgctatctgccgtttgctatctcagaccgtaaagcccgccaggctcacccggtattacaggcagtactgacactgctggaattaccgcagagccgtttcatctcagagcatgtactcagcctgctggaagtcccggcggtggcgcagcagttcgggctggatgagagcgacttaccgcttctgcgccgctgggtcagcggatccggtgtccgctgggggctggatgaccataatattgaatctttctcactgccggtttttggccagaacacctggaaattcgggctggaacgcatgctgctgggctatgccatggcagaggaggaaggtacctggcgcgggatcctgccgtatgacgaggtttccggtatgtcagcggaccgggtcggacaactggctgcttttattgatacgttgcggcagtggcagaaaatactgagtgaaccgcggacaccggcacaatggcgtgaaaccggttctgagcttctgtctgcctttttcatgacgacaccggataccgaaccggtgctcagtatggtgttacagcagtggcagcaggtactggatcagggggttaaagcctgttatgacggcgatgttccgcttgcattgatccgggatgagctctctctgcggctggatgacgagaaaatcagccagcgctttttatcgggagcggtaaacttttgcacgctgatgccgatgcgttctgtgccgtttaaggttatttgcctgctgggtatgaatgacggtgtgtacccgaggacaatcccgccgctggggtttgatcttatggcggaaaaaagccgccggggtgaccgcaaacgccgggatgatgaccgctatcttttcctggaggcgctggggtcagcaaaagaatatttatatatcagttatatcggccgatctatccgcgataatgaagagcgtaacccgtcagtgctggtcagtgaactgctggaatatgccggtctcagtttttgtctggagaaagaccggtttgctgacctggataccagccgggaagcgctggaaaatcatctgattgtccggcacaccagggttccgtttgcggcggataactaccgggagggcgcggaatttcagagcttttcgccgcagtggttaccggcagcattacggcagggcgaagcgcaggggccgtttaatgtcccggttccgtcagaagatataacagaaataaccattgatcagctgctgaggttttaccgtcatccggtcagggcattttttcagcagcgtctgaatgtccattttgatattgaggatgtggctctgccggaagaagaaccgttcagtgttgataatttacagcgttacgggtttaacacccggctgcttgatgcgctggtggacggcgaaccggaagagcgggtcttccgcatactgaaggcggcgggggaactgccggccggggcgtttgcacaggtttactgggaagaacaattacaggaaatggatgttctggcggagaaaatccgtaatgcacggacagaatctgatattgagtcgtttcactatgttaccgggccgtatacttacagcgggcaactgaccggagttcaggagaacgggctgctccgctggcgtccggcggcacttaccgccgctgacgggctgcgtttgtggattgaacatctgacatacagcctgagcggacggcagcagtacagccggatgtacgggcgcggtgatacggtgtggatctttgagccgctgacggcagagcaggcgcagggctatctgcgtcagctgctggatgtgtttgtccgtggtctgaatgagccgctgcctgtctttgtcaaaagcggctgggcatggctgaccacactggcggatgagaacaccggtgaactctctgatgatgatgcactccaacataaagccggtttactgcttctgcagacactgcaggggggatatcagtttaccggtgaggcggaggacgattatgtcgtccgcgcattccgccattttgatgaagcacttatggatgcaataaagcaattttcacaacaactctttttgccgatgtttcaacatcagaagaacagggagaatgaggctgatgcctaaacaactagtgcagtttatttttacgctgcttttcttttttaccggtgccaatgcacttgctcagaataactggcaggttctgcccggagagattgagaaaagcgccaacgatccgcgtcagtatcaggcaatcaccctgaaaaataatatgacggttctgctgatttccgataaaaccgcgcgcaaatcagcggcggcagtcagtttggccatcggcagtatggatgagccgcagagccaggctggtcttgcgcactatctggaacatatggtgctgatgggttcaaaacgtttccctgaacccggtaatttcagtgattatctggcgaagcacggcggcagccataatgccagtaccggctccaattacactgacttctattttgaagtggaaaataatgcgctgaaaggggcaacggagcggctggctgatgccctggcagaaccgctgctggatccggtgaatgcggataaagaacgtaatgcggttaacgctgagctgaccatggcgcgttcccgtgacgggcaccgcatgtatcaggtccgggcggaaacctggaacccggcacatccgatttcccgtttttccggtggtaacctggaaacccttagagataagcccggcagcatcctgcatgaagagctgctgaagttttataatacctattattcatccaatctgatgaaagctgttatctacggaccggagtccccggaagaactggcaaaactggccaatgagacgttcggcacgattccggatcgccacgcagctgttccgcagattaccgttccgctgatcaccgcagccgagcagcagaaaatcattcactatgttcctgcgcagccgcagaaatcgctggattttgagtttgtcatcgacaacaacagcaaagatttccgcaagcagacagatacctatattgcgtatctgctgggaagccgcagtgaaggtacgctggcgaactggctgatatccaacgggttggcggagagcgtcagtgcatcggcatcctcaaccttggcacgtaaccagggcgtgtttattatctctgtctcactgactgatgagggcatggcgaagcgcgatgaaattaccgccgctgtttttgcgtacctgaatctgattaaagaaaaagggatcaataaagactatttcgatgaaatcgcccgcgtgaatatgctggcattccgctacagctcggttgtccgtgatatgaactatgttgaatcactggcaaatacgatgatggaatatccggtaaaaaatgttctgaatgtcggctatctggctgatgactgggatcctgccgccatcaaagcccgccttgcggatttaacaccggaaaaagcccgcatctggtataccagcccgcaggaaccaagcaataaaaaagcctatttcgttgatgcgccttatcaggtggatgcagtgactgcagctcagctggataaatggcgtaaatctgaaggtgatttccgtttctctctgcctgcactgaacccgtttattccggataattttgatctgatcaaacagcaggaacagcaaaaaccggtacaactgacagacactgcaaaactgcgcctgttctatatgccgagccgctattttgcggatgagccgaaggcaattatcgcgctggaactgcgtaaccggaatgccggcagaacagccaaagatgttgtcaccagcgcgttgctcagttatgtcagtgaactgaagctgaatcagctcagttatcaggccagcgtggcaggaatggggatcaatatcagtgatgatgatggtctgaatatcagcgtcagtggttattcccagcatctgccggaactgctgaccaccgcagtgagtgaataccagtcctttacaccgtcagcatcggagcttgcacaggcgaaatcctggtatcgtgagcaggttgcggtatcggataacggcaaagcctatgaaatggcaatgcgtccgttcagccgtctgaaatcagtgccttattttgaagataaagaacgcctcgcagcgctggacaccattaccgaaagtgacatcacgcagtaccgtgaccgtcttatccgtgaaggtgctctccagatgtttgtattcggtaatctgacagcacctcaggcaaagcagattgcatcgaaagctcaggcacagctcggttcacagggtacggaatggtgggtcggggattactatgtgattgataaagccctgaaaccaaactttgacgaaaaagccaacagcacagataacgcgctggccaatatctttattccggacggttattcacggacggaaggtgctgcattctcgtctgtgctgtcgaaaattctgcatccgtggttctatgatcagttgcggacacaggaacagctggggtatgccctgtttgcatttaacccgaacttcggccgccagtgggggatcggtttcctgctgcaaagcaatgaaaagaatccggcttatctgtcacaacgctttgatgatttttatatcaatgcggaaaaacgcctgaaagcactggataatgcggagtttgataaataccgtaatgcactgctgactgaaatgacacaaccgccggaaacctttgaggaagaagcatcccgttattcatttgatttcaaaaataattactttgatttcaacacccgcgagcagacgattgcggcggtgaaaaaaatgaccaaacaggatgtggtgacattctatgagaacgcggtgatgtcgaaaaaaggactggcgctttactctcaggtgaccggtaccggcggcaaagcggatgattacgcgaaaccggccggatggacgacgtatccgtctgtcacggctttccaggcgctgttacctgttaaagaagaaatccggtaaaacgatggcggctgaatctttaaatccgatgacaataccgctgcaggggcagcggttaattgaggcctctgccggtacagggaaaacttacaccctggcccggctctatctgcgtctgctgctgggtattggtgaaggggcatttgtccggccgttatcggcggaagagatcctggtggtgacctttaccgaagcggcaaccaatgaactgcgggggcgtatccgtgagaacatccataagttgcggatcgcctgtctgcgtcatgaagaaggcggggaaccgggggaggattacggattcggtccgcttctggcgctgattgaggataaacaaagtgctgctcagcgcctgctgctggctgaacggcagatggatgaagccgccatttttaccatccacggtttttgtcagcgtatgctgacacacaacgcctttgaatccggcgtgctctttgaacaaacgctgattcaggatgagcatcctgtccgtaaacaggcctgcgaggacttctggcggcgtcattgttacccgctgccggttgaactggccagagccattacacagctatggtctgatcctgaggcgctgctgcgggatatttacccctggctgcagggggaactgccagggattaccgatgcaccggaatcggatgaaacattactttcccgccatgagaaaattatcgccgcgattgatgaggtcaaacagtgctggcgggaaagtgatgctgattttgtcagtcttattcagaactctgatctgaataaaagcagttaccgcgccaacctggtgcccggatggattgccggcattgatgactgggcgaaggaaaccgaaaccacacattacgcactgccgaaaaatatagaacgtttcagtcaggcagtgctggatgaaaaaaccaaaaaaggcggtacgccgccgtcacatccggtgttctctgcgattgaggaactgacagcacaggcactgacgctggaggatatcctgtttacccgcgcggtgtatgagatccgccggaccatcacgcaggaaaaacagaaccggggcgaaatgggatttgatgatttgctgacccggctggataacgcgctgcatcaggaaaacggcgctctgctggcgcagacactgcgcagacgttttccggtggcgatgattgatgaattccaggataccgatccccagcaataccggatcttccgcactatctaccaggaaaacaccggtgacaacggcacaccggcagatccgtacgggctgctgtttatcggtgacccgaaacaggcgatttacgccttccgcggcgcggatattttcacctatatcaaagcgcggcaggatgtcagtgcgcattacactcttgggactaacttccgttccgcgaagacgatggtcgacagcgtcaacaagctgtttttacaggcggatgagcctttctgctttaaacagatcccgtttcagccggtcagttccgcaccggataatgatgaggccgcttttattatcggcggaaaaacacaaccggcggtgcagttctggtggcaggccgcagagggggtcagcagcggggattatgagcggacaatggcgggagtgtgtgccgggcagatccgcgactggctggatgccggacaaaacggcacggcactgattggcaagcccgggaaacaacggccggtcagtgcggcagatattaccgtgctggtacgcagccgccgggaagcacaactgataaaagatgtccttaaccagcgggcgatcccgtctgtttttctctcaaaccgcgacagcgtgtttgacacaccggaagcccgcgagttgctgtggctgctccaggcggtgctgaatccggaaaaggagcggttgttgcgcagtgcgctggcatccgggttgtttggtctgaatgctgcgcaaattgatgcactgaatcaggatgaagctgcccgtgacaggctggtggacgagttcgccggttatggtcagatctggcagcagcagggcgttctgccgatgctgcgccgggtgctcagtcagcggaagattgcggaaaatcttctggtggggcaggacggtgaacggcgcttaaccgatatcatgcatatcagtgagttacttcaggaaacatcactgacgctggaaaatgaacacgccctggtgcgctggctggcacaacaggtattacgcccggatgcgcagtcagaaagtcagcagatgcggctggaaagtgatcagcatctggttcagatttgcactatccataaatccaaagggctggaatacccgctggtgtggctgccgtttatctgtaattttcaggcgggtggtcagcggctttatcatgatgaaaccaccttcgagccgtgcctgacactgtcaccggatgaaacacagcttgccctggcggataaagaacgtctggcagaggatttacgtctgttgtatgtggcggtgacgcgggcggtttaccattgcagcctgggtgttgcgccgattatcagagggaaccgcaaaaaaacaggtaataccgacctgcatcttaacgggctggggtatctgcttcagaacggacaggcatgtgacagcaaaaccctggcggagcggcttgatgctttttgtcagggcgacagcccggttgctgtcacccggataacagaaccacaactgcaactgtggcagcccggtatgtcacagccgccgtccctggcggtgaagccgtttacccggaatgtcagcagccgctggcgtgtgaccagttacagtggcctgagttacggtgcatcgtccggcggcactgtgtatacacaggacagacaggaagagatgatggcgatgatccgttctctcagcccgtcactggatacagatacgctcggtgaagtgcaggacgaaaccggaacggcacaaaccgccggtaccttcccgcgcggtgcgatggcggggacattcctgcacagcctgtttgaagagcttgaatttgatagtgagccctcacttgagtggctgagggagcaactgctgtcatacggattctctgctgaatgggcaccgttcctgcaaacctggttcacggatctggttaatacaccgttgtctgcggaagggccggtgctcagtgcaatcccggtacgttataaacaggatgaaatgcagtttttcctgccgatagacggcgacctgaccgcgcaaaaactggatgcactgacgcggcagtatgatccgctgtcagcacaggcaccaccgctggatttcgcggcagtgaccggtatgctgaaaggctttattgaccttgtgttttatcacgacggtaaatattacatagcggactataaatcaaactatctgggtgacagtcacgcagattatcagccggacgcactggcgcaggcgatgctggaacaccgctatgatttgcagtatcagctgtatacgctggcgctgcatcgctatctgcgccaccggttgccggattatgactatcagacgcatttcggcggtgtgtattacctctttctgcgcggcatgacaccggaccatcccggccgggggatctggttttatcgcccggagcaggcattcacggaacaactggatgccctgtttaaaggggaggaaggttaatgaatactcacttacaaatcttgtgtgcagagcagatcctgcgtcccctggactgtcagttcgccgccatgctggcaccggacagtcatcctctgctgcaactcgtctttgccctgctcagtgcacaaaccggcggcggacacgtctgcctgccgctgtcgcggattattcccgcagcggaacagggcggacggcatgcggagatcatgcagtctgtctgggaggcactgaatgagccgggactgccggagataaaagcggcgctgtctgcctctgatgcggttagtgatggctcacttcccgcaccggttgtgctgtcagaagagaatttgtacctgcaccggatgtggcagtatgaatgccgggtggcggaatttttctcccggcctcagcggatttctgctgatgcagagaaactgcgcccggttctggatgcattgttcggtacggaagaaccggaggactggcagaaaattgccgcagcggtagcggtcagcagccggacttccgttatttccggcgggcccggtaccggtaaaaccacaaccgttgcccgtattctggcggcactggtgcaatccgccgctgagccgctgctgattgaactggcagcaccgaccggcaaagcggcagcccgcctgactgaatcactgggtgaggcgatcgcgcagcttgatttgacggatgcacagcgggccatgatgccggagcaagccaaaaccctgcaccgcctgctgggcgctcagccggacagccgccggttacgccatcatcagaaaaacccgctgatgtcggatgtgctgattgtggatgaagcatccatggttgatttaccgatgatggcgtcactgattgatgcactgccggagaacgctattctgatcctgctgggggataaagatcagctggcttcggtggaagccggggcggtgctgggggatatctgccgttttgctgaatccggttacacaccacagcggcggcaggcgctggaggctatgaccggctgtgtgctgccggataagtcgccggcgcatccggtcaatgtgcaggatcacctctgcctgctgcgtaaaagtttccgttttgatgccggttccggcatcgggcaactggccaccgcagttaacaacggcgatatccgggaaaccatggcggttctcggcgggcagcggccggatgtccgttatgtgccgctggaggatgaagaaggctatgctcaggtactgacagacaccatgaaagcctatctgccgtttttatcactggtgaaacagcatgccgatcctgcagcggtgcttgacgccttcagtcagttccggctgctctgtgcgctgcgtgaagggccgttcggtgtggaagggctgaatgagcgcattgaacggctgctgcatcagcaggggcatatccgccgtccgctgatacaccggcaccgtgcctatcacggtaaaccggtgatgataagccgcaatgacagcccgctggggctgtttaacggtgatatcgggattatgctgacggatgaaaaccatgagctgcgggtgtatttccggctgccggacggcactatcaggagtatccgcccgagccgtcttccggcacacgaaacagcatatgtgatgacggtgcataaatcacagggctctgagtttgctcataccgcgctggtgctgccggtgcagccttcgccgctggtcagccgtgaattgctgtatacagcactgacgcgggcgaagcagtttctgaccatatacagccgggaagagtgtgttaagcgggcggtgaaaacgccgactcagcggtacagcggactgagcgggcgtttgcgttagtccggcggattactgaaagcccaggatcaggatttttgagcgccgctgatagttatacagcgcctgttttttgaccggcaggttttcaatttctgccgggacaaagccgcgctcctgaaaccagtgaatgctgcgggtggtgagcacaaacagcttttccagtccgatctgctttgcctgctgtgtgacccggtgcagcaattcctcgccgcgtgcggagctgcggtaatcgggatgcaccgccacgcaggccatttcaccgattttctcttccggatacggatagagtgcggcacaggcaatcgtggtattatcgcgttcaataatggtgaatttgtcgatttccatttccagctgttcgcgggagcggcgtaccagaataccctgctgctccagcgggcggataagctcgaggatcccgccgatatcattgatattggcgcggcgtgtctgttccgagctttccatcacaatctgtgtcccgataccgtcgcgggagaagagttcctggataagcgcgccgtcctcctggtaactgagcagatggctgcgtttcacgccccggcggcaggctttcaccgcaccgcgcaggaaacggacggttccggagtaataatcgccgccgccttccagcgcctgtacatagtgctctgcatcattcgggtgcatttcggagataatcccgccgtcatccgccaccacaccttgcgcagagcagaaaccgatcagcttttctgctttcagtttgacggcaatctgcgtggcaatttcttcggaggtcagattaaagctttcaccggtgacagaaaccgccaccgggccaatcagcacgataccgccgttattgagctgacggttgatagcatcttcatcgatccggcggatacgcccgctgtggcagtaatcaataccgtcatccacccccagcggctgggctatcacaaagtttccgctcaccacattgatatgcgcgccctgcagcggtgtgttgctcagacacatcgacagacgggcggtgatatcgagctgtaactgtccggctgcctgcttgaccagctcgagagtccgcgcatctgtcactcgggtatttttgtgataaaccggctcgcactgatgggccagcagatttttttcaatttgcggacgggcgccgtacaccacaatcaagcggatgccgaggctgtgcagtaagccgatatcattaacaataccgggaaaattttcatgctcgatagcttcgccgcccagcatcaccacaaatgttttgccatggtgagcattaatataaggaaccgactgacggaatccgtccaccagttcgatactgcgctctttcataacaccctcgtaagtgaatttttattcgtaatttatgtatttttattcttttgcaaaggaatagcaagcgtaaattttggtcgccggttaagatttcaccgggttttatgccgcgttatcgccatataagccaaaaatgcataatgacagggcgcaaatgattagataaagtgccgtttaaattatttacggaataaattgttctgcttctttattttccggttttcataacccgcaccggttattgttgatttgatttacgctatggatattttttcatgagtcattctgaacatgatgcgtcgcgccgtctgttactgaaaggagctgcggcgttttgtctgctgagtatcagcccgttcggctttgcggcgtcgtcacagattgtggcggtgcgtatctggccggcatccagttatacccgtgtgactattgagtcggatcatccgctgaaatataagcagttttcactgcagaacccggaacgtatcgttgttgatctgaaaaatgtgcacctcaacagtgtgctgaaagggatggataagcaggtgcaggatcgcgatccgcatctgaagctgatccgtgtcggtcagaatgatccgcagactgtccgcctggtgtttgaagtgaaacaggcgatgagcccgcaggtgctggaactgaccccggtcgctgagtttaaaaaccgtctggtgcttgatttttatccgaaaaatggtgctgcgacagaagacgatcctctgctggcactgctggaagattacaaccgcggtgatctcgaagaaagcctgccgcgtgaaacgccgaaaccgggtaaagccggtcaggacaggccgattgttattatgattgacccgggccacggcggggaagaccccggtgctatcgggaaatacaaaacccgcgaaaaagatgtggtgctgcagattgcccgccgcctgaagtcgcttatcgatcgcgagccgggtatgcgtgcctatatgacgcgcaacgaggatgtgtttatcccgctgtcggtgcgcgtggcgaaagcccgtaaaatgcgggcggatctgtttgtctcaatccatgcggatgcctttaccaaccgctctgccagaggttcgtcggtctttgcgctttcgacgcgcggggcaaccagtaataccgcaaaatatctggctcagacccagaacgatgcggataaaatcgggggcgtcagcaaaagcggcgacaaatacctcgaccagaccatgtttgatatggtgcagagtgcgagtatcaaagacagccttaaattcggttcagaagtgctgaaacggatgggaaatgtcaacaaactgcataagcgcacggttgatcaggcagggtttgcggtgctgaaagcaccggatattccgtcgattctggtggaaacggcgtttatcagtaaccttgaggaagagcgtctgctgaaaacggccaaattccagcaggagatggcaaattctattttcctggggattaaggcgtattttgccaacggcggggctgtcgcacgacgcaactgaaaatacggtttatcacagaaattgtgcatcacaaggatgtggtgtgaaacggacagatacagtacagacatagttatgcactgaaaaaaatcgttttcaggaatgaattttgtgtgttttcaggaaaagttgacagagaatttgtcagaagagtggttgcgggggccggatttgaaccgacgaccttcgggttatgagcccgacgagctaccaggctgctccaccccgcgtccgaatttgttaatgatatgaaggttggttgcgggagccggatttgaaccgacgaccttcgggttatgagcccgacgagctaccaggctgctccatcccgcgtccgaatatcattaactgagcatatcacattgtattcacagacagcgcacttcaaaattggttgcgggagccggatttgaaccgacgaccttcgggttatgagcccgacgagctaccaggctgctccatcccgcgtctgtgaggcgcttactatactcaggatgagagctgatgcaagttttttcttgataaaaagctatgctaccccctgatttggttaattatccggctgattgcgtgttttttattcatttgaccggatgattgttcagcagcaaaaattaaagcggttgcataataaaagcgatttgatatcgttcgcatacatattgcattaattcaaattattggttggcggatgggtatgagcaaaaccggcaggtatttgttgtgcggcgtattattttctttattggttggttgtgaatcgcgtccgacagataaaggtcagcagtataaagacgggcatctgacacagaatttacaggaagtggcgagcgtcaacagtcccggtgtgccggtcaacggcccggactttctgaaacaggtggaagccatccggacaacctcgccacgcctgtacaatcagtacagcgagaacttccgtgcggttgaaaactggctgcgctccggtgcggataccgcacagttgcggcagttcaacctgcacagctatcagatggaaggcaaagataactacggaaatgtgcagtttaccggctattacaccccggtcgttcaggcccgtcatacccgtcagggggagtttcagtatcctatctaccgcatgccgccgaaaaaaggcagccgtctgccgagccgggcccagatttataacggcgcgctgagtgataactatgtcctcgcctacagcaactcactgatggataatttcctgatggatgttcagggcagtgcttatattgatttcggtgatggttctgagctgaactttttcgcgtatgccgggaagaacgggcacggttataccagtatcgggcgtgttctgatcgatcgcggcgaggtggagaagaaagatatgtcgatgctggcgatccgccagtgggccgataatcactctccgcaggaagtgcaggaattactggagcaaaacgcctcttttgtcttcttcacaccgaagcagtttgcaccggtgaaaggggcgagcgcggtaccgctgattgccaaagcctctgtggcctcggataaaactctgatcccgccgggtaccacgcttctggcggaagttccggtgctggataaccagggtaattttaccggccgttatgatatgcgtctgatgatcgcactggatgtcggcggggctatcaaggggcatcacttcgatatctatcatggtatcggccacgatgccgggctgatggctggtttctacaatcactacggccgcgtctgggtactgaaaaaagggatcccgccgatcctgaacccggcgctgtagtcttccttttgtccggtgtatacttcactctgatgtatgcaccggcatcaactccttctttttccgtgactgacaccgcaggttcccgatgacacaaacttctttatctgatgcgtacttacagcgcttcgccggtattggccgtctttatggtcagcaggcactccgtttatttgcccggtctcatttctgtgttgtcggcatcggtggtgtcggctcgtgggctgcggaagcactggcgcgtaccggaatcggtgccattacactgattgatatggatgatgtgtgcataaccaataccaaccggcagatccacgccatgcagggcacggtcggacagccgaaaattgaggtgatgcgggagcggatcctggctatcaacccggaatgtgaggtgcattgtacggatgattttgtcacgccggataatgtcgcagacatgatgagcccggggtttgattatgtgattgatgctatcgacagcgtccgcccgaaagcagcgctgctggcttactgccgccgcaataaaattccgctggttaccaccggcggtgccggcgggcagatcgacccgacacagattcaggtcgcggatctggcgaaaaccttacaggatccgctggcggcgaaactgcgtgaacgtctgaaatcagattatggtgtgcgtaaaaacggcaaagggcggctcgggattgattgtgtgttctcgacagaaccgctgcgttacccgcaggcggacggcagcgcggcctgtggtatgaaaaacagtgcggaagggagtatgcggatggactgtgccgccggattcggtgccgccaccgtggtcacggcatccttcgggtttgtggcggtctctcatgcactgaaaaaactggtggcaaaagcggagcgtgctgcggcggaataagcctttcaggcgctgaaccgctgtgcaatggcgcgggcggcatcaatcagtgcctgaatcccgttttgtctggactggctgagctgcgcactcagcccgtactgttcatacgctgcagataaatccgcggataacagagctgccggtgtcagaccttccgcttcggtcagcagtattgccagaaggcctttaacaatccgtccgtcactgtccccccaaaaatgcagtgtaccgtcactgctgagtgtgccatccagccagacgcggttttcacagcctttaatttctgtctcttcacctttgctttccggcggcagtgccggtaactgacgtgccagcatcaccagctgacggtatttttcctcccatgagcggcaggcggaaaaggtttccgtgagctgctcacggcggatagtgtggccgaacgggtttgccgggaatgtgtgtgtcatctttttctctcagttgtcagccagaatttcaagggcaaactgtaccgcctgcaccagctgacggacatcatccggctgattatacggcataaaggagacccgcagacagccttccgtgcccagcgcctgacacagcggctgcgcacagtgctgcccgtggcgcagggcgatatttttttccgccagcagcgtggcgatatcactgtgatgaataccatcgatattaaaggccagcagcgggctgccggggctgcggtaactgcggaaaccggggagtgccgcgagctgctgttctgcactgtcacacagtgcaatggtgtaatcgtgggcggcggtgagatcgattgtatccagccagcgcagggtttctccgaacgcggtaacaccggccacattgggcgttcctgcttcaaaacgggcgggaaccggagccggggtgaagctgaaaaagtcggtatccgtcagcattttgccgccgccctgccacggctgcatgtcactgagcagctccggacggccgtacagcacacccagcccgttcgggccatagagtttgtgggcggaaaacgcatagaaatcaacatcactgagggtgacattcagcgggcggtgaaccacgccctgagcaccgtcagcgacaatcagtgcgccgtgctgatgtgccagctgcgccgcgcgggcaatatccggctgacagccggtgacattggacatctgtgtgaccgccaccagccgggtgcgtggtgacagcagggtttccagctgatcacagcacagtgttttgtccgctgtcagcggccatttcaccagggttgctccggtctgctgtgccagcatgatccaagggatcaggttggaatggtgttccatctcactgacaatgatttcatcccccggctgcagacgcgggcggaaaaagccctgagcgaccaggttcagggattcggtggtgccttttgtccagatacagctgcgagcgtcctcagcctgaatcagctgccgcacagcgtcacgggcctgctcaaactgttcagtgacggctctggcctgccggtgatggctgcggtgaacggtcgcgccgctgtcatgctgataatagcgggcggtggcctgtgtcatcacctccggtttaagggcggtggcggcgctgtcgagaaaaatagtgtcaccggcagtcccgggaaaggcgcggcggaatgtatcgggagaaaaggttttcatcagtgttatcaacggcagtctgagataaacagagcttatgcaaaaagtgcggtatccggtacatcagaggcgggagcccggtggtgaccggccggatcgcggcggtagcaccgtcagcgacggtttactataatcaacatcgtggcggctttccagacgggggaaacgtatctgcggacggaaggcaaaaaaaagcaccgcaatcggcggtgcattcaaaaaatcactatggacagacagggtaaatgtacaggaagtgaaaaaaacagtagcttaagctactatgtccggaactcccggacaacttgcaaacacaacatcacaaccacatagccaaaagttttgcagtatcgctaccgttcaacttttcgttccggcttaggaagtgggcatactataggtatttgctggtgtatcatcaagggacaatttataatgcttcggattacaaaaactaatcccgactaaacttacgttaccggtatccggatctgacagaaaaaccagaaaatgtccaaacgattgcctccgctcaatgctttgcgtgtcttcgatgctgccgcccgccatttaagttttactaaggcggcggaagagctttttgtgactcaggccgcagtgagccatcagatgaaaagcctggaagatttcctcgggctgaaattattccgccgccggaaccgttcgttgttgctgacggaagaggggcagagttattatctcgatattaaggaaatcttctcagcgataaacgacgccacacgcaaactccaggcacgcagtgccaaaggggcgctgacagtcagtctgtcaccgagtttcgcgatccagtggctggtgccgcgtctgtccggctttcatcaggcctatccgggcattgatgtgcggatccaggcggttgaccgcgaagaagataaactggccgatgatgtggatgtggcgattttttacggcaggggtaactggccgggtctgcgtacagaccggctgtatgcggaatatctgatcccggtgtgcgcgccgtcactgatgaccggtgaacggccgctcaaaacgctgaccgatttgtcgtatcatacacttctgcatgattcatcccgccgtgactggcaggcgtatatccgtcaggcggatttgcagcagcaggttaatgtgcagcacgggccgattttcagccacagtgcgatggtgattcaggccgcagtgcacgggcagggcgtggcactggtcaataatgttatggcaaaaaatgaactggatgccggtcgcctggtgtgcccgtttaaagatattctggtcagtaagaatgcgttttatctggtgtgtcaggacagtcaggctgattccggtaaaatcgcagcattccgtcagtggattatggcgcaggcggcgagtgaacaggaaaaactaggttggatgacaagtgagcaggattaacctgaacttcacataaggtatggcaaatgaatagtcggttgatgttaatttttgccggtttcagcggctttttttatgttgcattcggcgcaatcggatcgcaccttttaacaccggttctggcaaagcaccagatggactggattaatctgggtctccagtaccagatctcacatacactcgccctgatggggctggccgctgtgctgatgcgcaaagtggtattgtggttttactggagcggactgtttttcgggatcggcattctgctgttttccggcagcctgtattgtatggcgctgttacagatgaaatattttgcctattttacgccggttggcggggtaagtttcctgttaggctggttttgtgtattgattggcgcgctgcgtctaaggaaagtggcttccggccatgaataaaatagcattatattgccgtccgggttttgaaaaagagtgtgcagctgagatcacggataaagccgggcgtcttgagatttttggtttcccgcgggttaaagagaacagcggttatgtcatttttgaatgctatcagccggatgatgccgatcgcattgcaaaagagatcccgtttaaagaactgatttttgcccgtcagatgatagttgtcggcgaactgctgaaaaacttacccgaaaatgaccggatttcgccgatcatggggatgctgaccggcgtggtggagcgtgcgggtgatctgcgcgtcgaagtgcctgacaccaacgaagccaaagagctgatgaagttctgccgtaaattcacggtaccgctgcgttcggcactgcgtcaggaaaaactgctgctggcaaaagagaaccggggccgtccggtcattcacgttttctttatcgcgccgggctgttgctatgtcggttattcttactcgaataataactctgcgttctacatggggatcccgcgtctgaagttcccgtcagatgcaccgagccgctccaccctcaagctggaagaagcatttcatatgtttattccgtacgacgaatgggaagagcgtctggaaggcggattacaggcggtggacctgggggcatgcccgggcggctggacgtatcagctggtgaaacacagtatgcgtgttcaggccgtggataacggcccgatggctgaaagcctgatggaaaccggtcaggtgcgccatctccgtgaggatggctttaagttcgtgccgacatccaaaaatattacctggctggtctgcgatatggtggaaaaaccggcgaaagtggccgcgctgatgaccacatggatggttaatggctggtgccgcgagacgattttcaaccttaaactgccgatgaaaaagcgctatgaagaggtatctcatatcctcgaaaaaatggctgctgaaatgaaagagcagggcgtgaatgcgctgatccacgcgaaacatctgtatcatgaccgtgaggaaattacggtgcatgtccagcgggtgtggggtgcatataacccggatcgggtcttctgatgaaaaatcccggcaatgattgccgggattttttttgtatcacttcaccttcggcaggaaagagatatccatgtagtatttatcaggatttttcttgtccacataaacggtgacaaactcctgattaataaacggtgaggggtcaaacgcaatattgtggctgtaatacagtttcaccgtgtttgccgcagtgtcatgcatttgtgccacaatctgaaacgggctgcggccgttgatattgatcgtggtattcaggatcacttcactgaaccgggctttgaccggcattccttcccgcagcaggcgctgaccggatttactccgcagatacatgataatcagcggcagcgtaccgaccagtgcaaataccgcacccattccgagaagaatcacggctccgccgtacagaccgccgaaagagtggataaccgcgttatccgggttgcccggctggtaaataacatcaatatcgtcacccagtgcattgtggtaaccgctgctgcaataagaggactctatgacatactcttcctgcccgtcagtgtatttcaccacaggacaataagtagtaccgtcatcagagcgatgaacagacagatcgataatttgtccggtgaccactattccgcttttttcctgtgaataaccggaaaggtaaaagtaactgccgcccatcagcatcagcaaaccaataacagcaaaaacccctaaaataatgcgtgctttcgtaaacataagccatccgctagctggttaatatattaataaaaccgagtgtaggggatgtccgccggtttatctaacgattttaacttaagctaaatttgaccgggattattccgaacgaagctgagtaaacacaggcactccgttgtctggtttaagagctgctgtttcccgctggtaagcgcaactggctgagattgccctgtaaatgcagatcccgcttcagggtggcgacgtcacggcagctgtaagccatggcttttccgtcgatcagtttctgacgccatttttccggtacccggtcaatgtcgctgtaaagtgagtccagatcagcaaaggtgctgagcagtgtggccgctgttttcgggccgataccggtgatgccgggaattttactgctgctgatgccgcttaagccccagaagtccggtaattgctgcgaggtaacaccaaattcggcggcaataaacggcatatcgagccagcgtttctgaaaatagtcgcggatctgaatctgcggggagagcagctggcagtagcctttgtcggtggagataatcgtcactctgtgtcccgcctgaccgactttgtgcgccagtgtggcggcgagatcatccgcctcatccccttcggaatgccatgcccggatgccgtgacgggcaaacatttcccgcagcagcggcagttcctgccggacaacctccggcatctcactgcgtcccgctttgtaacccggcaacagctgatgacgccagctgtgactgcggtcgtcctcatcaaagacagtgaccgcgtgtgtcggttgtgcatgattcaggatctgcatcagcgcctgctcacagaccagcaggccggactggctctgcacggcgtagatccggcggatcagattcattgcatcgataatcagtaaatggatcatagtcgctatatataatttccccgccggcggcggggaaacagttcagataaaaagtatcagcggatgatttcgtagcatggctcgtaagccgtgccgcccggtaatttcatccggtgctgttcaacaaatccgcgcagcatgacatccatccgctgcataatggcttcttcgccgtggattttgaacggcccgtgctgtgcgatggcctgcataccattttctttcacgttaccggcgacaataccggagaacgcacggcgcagatctgccgccagtttttccggctcctgattgcggtacaggttcagcgcggccatattttcatgtgtcggctcaaacggatgctgcagatcaccggcaattttaatcgaccagttgaagctgtaagcatccccggtgctgcggcggttatctttcacttccggcatggcgcgtttcattacgcgggcaacttccaccggatcatcaataatgatctgataatggcgggtagcttcttcgcccagggtgttgatcacgaaatcattgagcacacggaaatagtcggcgctctctttcggcccggtcagtaccagcggcagcacctgatctttgttttccggatgcatcaggatccccagcaggtagagcagctcttcagccgtaccgaccccgcccgggaagatgatgatcccgtgtgccaggcggacaaagctttccagacgtttttcgatatccggcatgatgataagttcgttcaccagcgggttaggcggctcggcagcaataatggacggctcggtcaggccgataaaacggctgtttttgtaaccctgttgggcatggccgacagccgcgcctttcatcggcgcttccatagcacccggtccgcagccggtacagatattcagctcgcgcagccccagctcgttaccgactttacgtccgtacaggtattcggtttcattgatggagtgaccgccccagcagacgatcatattcggatcttcatcaatatgcagggcgcgggcgttacgcagaataaagaaaatcaggttggtaatatgtgcgctgttgtccagattcaggccgcggcagcgctcggcatcggtgatctgagtctgtacgaacagaatatcgcgcagcacggcaaacaggttagcctggagtgaacgaataattttgccgtcaacaaacgcattctgcggcgggttcaccagttcgagttttaccccgcgctcacggcgcagcacgttaatatcaaagtccgggaaacgggacagtaattcatgactgttatccatctggctgccggaattcagtaccgccagcgaacagttgcggtacagacggtacaggtgactgcttgctgtccgtttcagaacatcaacttcaagctgggaaagcagatccatagagcctaacgggctgatatgtgtgatcaagtaaaactccttgttatcccgtggataaattgtagtcgtacaggttgcgcgctgtctgccttactgacgggcaagacggtccgcagacggtgtaaagtccgtattggtgcgccacggattgatatccagcccgccgcgccgtgtataacgggcatagacagtcagggcaaccgggcggcagtgtgtattcagatcggtaaaaatccgctcaacgcactgctcatgaaactcgttatggttgcggaatgacaccaggtaccgcagcagtttttcacgatcaattttggggccgcgatactgtatggcgacggagccccagtcaggctgctgtgtaatcaggcagtttgattttagcaggtggctgactaacgtttcttcaacgacatcgtcattttcattgacggcatcaataagataatcactgctgaactgataatcagtaatcgtaatatcctgataatcgatacactcgccggtaaaatcaatgattttttgtccggtgaactgatccgggcgcagcaactccactgtcacctttccctgtgcacaggcgcttaaatcctgctccagtgtgcggcggacatcatccgcagaggcaaatactgtctggttaaagctgttgagatagagcttgaagctcttggattcaatcagattcagcccggcggcatcgagggaaacatagccgagcgcaatgcagggcacgccgttcggctgtaaccaggagagctcatagagtgtccacagatccgcaccgcgaaaaggcagattatccgcatgcagatgcagggcatcccggttgaggctgcgcggcacaccctgcaataaggcaggattgtaatgctgctcataaccggtttttttaccgagcgtcagtgacgccagttccgcctttccttcatacagagacataaataacccttttacctcaggtgaaaaatagtaccgcctgtcgccaatacagtctgtcatacgttactatagcggcatgatacttttatgtttaacaggttttgcgatatgacccgcacagtttctcaggcgttacatcagtttacccggcattatgtcggtttatggcaggaaaaaacaggtttaccgccgatcagtcacgatctttatggtattccttccccgtgtattatccgcaccggtgatgaatgtgtgtactgggagccggcggaattcaccgcagacaagcatttgcagccggttgagaaagcgctggatattcagctgcacccggatatcagtgaattctacacgcagcagtttgcgggggatatgcaggctgtttttgaggatattcagctcagtctggtgcaggtctggagtgaggatgattttatccgcttacaggaaaacctgattggtcatctggtcacgcagcgccgtctgaaactgccgccgacacagtttatcgccacactggaatcggaatttgacatgatttctgtctgtaacctgagcggtgaagtgatcctcgaaacgttcggtaccacaaagcgccgggtgctggcggcggatacggcatcattcctgtcacagctgacggcggtatgcacagcataaatatcactgacagcggtgtgggattttaccggtgatggctgtaatacggtctgccgcaaagtgatgattttctgaaaataaccaataaattcatgtggttaatatttctgtgtcactgtgatttcccgccggtattattgtttgtcacgccgtgctgcggcatgctgtctgtgcccataaggaagtggacggaaatacacggatgtattttcagcagagacaggatgttattttattaaaaacgagggggatttttccccctcgtttttaatccccccgcaactccccgttatgcctttttatgtcttccggacaggaattgatttttacttatctgacctcaatgttacgctacagatatcagcggcattggctgcggaaaatgaattttacagcgtaaacaggtttcagttatgacaaaacatcagcagattactgcgatcctgacggacatcgagaatgagatgcgcgccgtcgagctgtggcaggggcagcctccggcagcagaagcatttgaaagcgaactgccgtttgcggtggataccatgaatgcccatgaatggttacagtggatccttatcccgcgtctgtatgccatgattgaacagggcgcggcactgccgtccgcctttcagatagccccgtattttgaagagcactacagaggggacgaacaggctgcacgctatctggtgctgcttgaccatttacgggcactggacgggcttttcgcgtgacacaaccattgcaggacacgccattaccggaaaaaccattactggaaatctgttatcaggatgaacatatcgtcgcggtgaataaacccgccggatggctggtacaccgcagctggcttgaccgtcatgaaacggtatttgtgatgcagacactgcgcgaccagataggtcagcatgtttttccggttcaccgtctcgacagaccgacctccggcgttttgctgatgggattatcgtctgaggtagcacgcctcctgtcacaacagcttgagcggcatgaaatgcagaaaacctatcatgcggtggtgcgcggctggatagaagaaacggcgacgctggattacccgctggtggaagagctggataaaatcgccgataaatttgcggcggaaaaaccggcgcaaccggcagtgacacactaccgcccgctggcgaaagtggagtgtccggtggctatcgggcgttacccgacatcccgttttaccctgacggaactgaaaccggaaaccggacgcaaacaccagctgcgccgccatatgcagcatctgcggcatccgattatcggtgataccgcgcacggcgatctgcgtcagaaccggggattcacagaacatttcggcagccgccggctgatgctgcatgcatctgaactggcgctgacacacccggtcagcggagagccgctggtactgcatgccggtttcgatgaaacctggcagcgggtggcggaacagcttggctggacattaccctgatttattaataatttgattttactgatgaaaaaggacggataatggcacgtatcggtatttttatcggcacagtttacggcaactcgctggctgtgggtgaagaggcgcagaccattctggagcaggccggtcatgaagtggtgttatttgatgaaccggaactgtcacagtggaaagattaccttacagatgtggcactggtgatcacctccaccaccggacagggcgatctgccggataatatccgcgaactgtttgccggtctgcgggatgacatcggttatcagccgtcactgcgctacggtattatcgcgctgggcgacagcagttatgataattttgccggtggcggccatcagttcaatgagttactgcaggaacagcatgcgcagcgcatcggcgagatgctggtgattgacggcgcggaagtcgctgcaccggaagagtttgcacagccgtggctgaaaacctgggcggcactggtcagctgatcacggaaaacaacgccgcagcagctttgcagcactgcggcagtgtttcatccggttacttgcgggtcagtttttccagatcgctttcaatttcagcgatcttattggacaccacatgctccagatggcggagatcgtcgaggatcttacgtttcagatcgatttccggcatcgcgctctctgtctgctggcagatggtatccagctcttcgatgacataacgcaggttgctgttgatctcattaatctctttgaaaccctgtgcatcctggatagtcttgcgctgacgcgggtacttaaacttcacgctcttggcgaaaaactcgcctttatccttgcggaaatagattttcagaatgtcgttgttcgcttcctgacgaagagtatagcgatcaatatcttcaggatgcgtaattcccagactttttaaattgtcgtacatgtgcgccacctattgattgttattctgtcctgttcccgccgcaaaaggcggaagataagatgcacggataaaaaaatagcggagttattatccgctatttctgagattagtctatggtgcgtaacaattcattaattccgaccttgccgcgcgttttttcatctacttttttgacaatcaccgcacaatagaggctgtaacggccatcttttgacggcagattaccggagacaaccacagagcccgccgggacacggccgtaatggatttcgccggtttcgcgatcataaattttggtgctctggccgatatacacacccatggaaatcacggaaccggtttccacaatcactccttccaccacttcggaacgtgcgccgataaagcagttgtcctcgataatggtcggattggcctgtaacggctctaataccccgccgataccgacaccgccggagagatgcacgtttttaccgatctgcgcacaggagccgaccgtcgcccaggtatccaccatcgtgccttcatccacataggcaccgatattgacgtaagatggcatcagtacggtattgcgggcgataaacgcaccacggcgggctgccgcaggcggtaccacacggaacccttcgcgctcaaaacgcgcctggtcgtaatccgcgaatttcatcgggactttatcaaagtaacgggattcagccccgtccatcacctgattgtcactgatacggaaagagagcagcactgcttttttcagccactgatgtgtcacccaggtgccgccgattttttcagcgacgcgcagttttccgctgtccagtaactcaatcacctgattaactgcgtcacgcagtacaggggtggcagttgccggtgtcacagcggcgcgatcttcaaaggcggattcaataatggcctgtaattgctgcatcggtgttcgtttccttttatctggtgctttgatgaatttactctgttttatcctttgaattgagggcttttgtcaaccgttcagtcagttcttcctgaatatttttatccagcgctttattatccttatccgtcagaataaaaatatcctcgactttttcgccggttgtggtgatgcgcgcgccgtgcagctgaaggccgagtacggcaaaaatctgaccaacctgcgccagcagtccgggtttatccagcgcatataattccatgtagctgcgcaggccgcgtttattgtgaataaacttcacccgcgtcggcacatcaaaatggcgcaatttggcgggggcggtccgggtgcggtggttcggtacataatctgtggtaaccgcgcaggccagtgctttacggatagtgtcatggcgatcggcggcgagaggcttgccgtccggctccagcaccacaaaggaatccattgccatattgtcgcggttggtgaaaatctgggcgttctggacactgagattgcggcgatccagctcgctgaccaccgaagcaaacagggaagggcggtcgttgcaccagataaaaatttcactgccgccgtggctgcgctggttactgataaggatcagcggtgatgccatatcatttttcagcagtgccccggcgtgccaggcaagctgttccggggtatggcgcagaaaataatctgcatgacagcgcgaccagaaccggttcagtttctgctcatcggcaccgtcctgacgcagcagggccagtgcacggtcgcggtggtggcggatccgctggcgcagattcggtttattatgcactccgcgtaataactggttttcggtgctgataaacagttcgcgcagcagactgcgccgccagccgttccagagcgaggcattggtcgcccatatatcggcaacggtcaggcagataaggtaacggagccgctctgtgctctgcacctcaccggcaaaggtgcggatcacttccggatcctgaatatcccggcgctgcgcggtcaccgacatcagcaggtgtttttccaccagccagctgaccagagctgtgtctgcttcattcaggtcgtgatattcacagaattcccgtgcatctgccgcaccaagaacggcatgatcgccctgtctgcccttggcgatatcgtggaacagagccgccaggcgcagcagttccggctgcggcagtttcggccagacatccacacacaccggatgattcacccgctcggattccagcctgaaagtatcgatttttcccagcacccgcagtgtgtgttcatccacggtataggcatggaacagatcgaactgcatctgcccgacaatattgccccacagcggcatataggcacccagcacaccatgacggtgcatcggaacaaacgcggcgctcacaccgcgcggatggcgcaggatcgcgataaacagctctctggcctccggatactccatcagcggacggctgagatgccgccgggcatggcgcagctgacgcagtgtgccggaatgaatgccggtgatggtgtcatcacaggccatgcggtaaaacatccgcataatggcagcgggatcctcactgaacagcgaatcacggataagcccgatacggtggccgtacagctgaaaatccttatcaagcggtttgggggtatcgtggtgccctgcgtgcagaatggcttcgtcgaacaattgcagcagcatttcattgagttcggacacgcggcgggtgacgcggtaataggctttcatcatccgctcgaccggctgattgtgctcgccgtcatacccgagctgctccgccacactgagctggcgatcaaacagcaggcggttatcgtagcggctcagagacagatgcagggcaaagcggatgcgccagagcatatccagacattcattcagctcttcccgctcggcatcggtcaggaagccggaaccggccatttcatacagcgacgtcgcaccgaaatggcggcgcgccacccagagcagggtatggatatcacgcagcccgcccggactgcttttgatatccggttccaggttataactggtgctgtgatagcgggcgtggcgctctttctgctctgccagtttggcggcaaaaaagcgcggtgacggccagaagctgtcattaaatatctgccgctgtaactgcaggaacagcggcagagtgccgcagataaggcgcgattcaatcaggttggtggcgacagtcaggtcgccgagtccttcgcggatacactcatccagggtacggacactgtggccgaccgtcagtttcagatcccacagcacggcaataaactccccgattttcggcgtgagtgcttccggcagcggggctctgctcagcagcaggatatcgatatccgacaacgggtgcagctcccggcgaccgtaaccgccgaccgccaccagggcgaaatccgccacctcatcaaaactgaaaaactgccacaggcggatcagcagctgatcgatataatcactgcgggtcagcagcagggtatgaaccggctggccttcgcggaaagcctctgcctgccagcggcggtaatgctccaggtgttcccgcagcacaggcagctgcaaatcatcatcagtaaaggataacggcgaggcgggtttcagggctgatgcggtactccgggcgttgtccatgcgggatccttgtggcagaggtgttctgctgcaaggttactgcgtcagcggggaaataaccagttttttgccggtccgccggggttatatcagcacagggcccggcatcgggataaactgcagaataatgcgtttgttttcatcatccacccggtaaatcaggcagctgcggaagtagttatgcaggacgtcactgaggttaatataggtatcttcggcgatcccgcagccgttgctttgtccgtcagtgcggcacatgccctgattgacgatatccttcaggtacggggaggattgcagtatttccggcgcattatcatcggtactgaaactgaacagagagcggtccggtgaagcagtcagacgggtgatgcggtagctctccccggcattcaggtactgtctgctctcgcttgccagcgcggcggtatcaatattcagggcagtgatgctgatccggccgttgaaatagggattttccgtcggcagcagaatgtttttccgcgtcggaaacgactgttgtgacaacgcaaccagtgtgaaataggagccgaggctgcttgccgggacatacactgactggtgatcaaacaccggtttggtaaaggccagatcaaacagattcagttcgtaaacattctggtggatctgcacaccgacagcatacccgcgtgcgacaaactctttctgccaccagccggatgacttggtcaggaaataaaacggtatcagcatgacaagcaggatcaatgtgacaataccaataatgatacaggcagatttccggggggaagttgtcattccggttattcctcagcgtcctgacggcggggaggtatcatgcccggcatgtgcgccggacatgaatacagggcggttactgcgcaacgagaatacgggaaagcgcgccttcctcatctttacgcagggtcatgatttcacagccgtcatcggtgacaaccagcgtgtgctcatattgcgcggataagccgcgatctttggttttgacagtccagccgtctttcatggtacggatgcggtaatcgccggtattgagcatcggttcgatggtaaatgccatgccttttttcagcaccacaccgccgtcatcgccgtcataatgcagcacctgcggctcctcgtggaaaccttcgccgataccgtgaccgcagtaatcgcgcacgacagaataatcatggccttccgcgaatttctggatagccgcgccgatagtccgcaggcggatgcccggtttaaccatacgcagtgccagatagaggctctcctgtgtcacgcggcacagacgctcgccctgaatcgtcggttttccggcgataaacatggcagaggtgtcgccgtggaatccgtctttgataacagtgacatcgatattcacaatatcgccgttttttaagattttatcttcactcggaatgccgtggcagaccacatcattgacggagatacagacagatttcgggaagccgtggtagccgagacaggcagaaatagcctgctgttttaccgtaatatgctcgtggcagatgcggtcgagttcaccggtactgacacccggcacaacatgcggggcgataatttcgagcacttcggccgcaagacgaccggcgacacgcatcttcgcgatgtcgtcttctgttttgattgtgattgccataattattgatatccgaaccgggaatgccccgtgactttacttaggaatactggtactgaaacgcggtatgttatcagccggagaaaaggatgccaatcattgcgcggaaacccggcggacaacggataaccgccggcatgaaaactgaagaaaatgtggtatcgctgcggcttttatggtataaagcgcgccggcattccgtgtattttgcccggttgccggaaacttaaattaactcaactgttataacacacacgaatcggcacgtgcgccggggtgctccgaagcttaacgctgacagggagtcggaagcatgggattcgtggaggcataaccccaacttattatttacagaggtttaaaatggctactgtttccatgcgcgatatgctccaggcgggcgttcacttcggtcaccagactcgttactggaacccgaaaatgaaaccattcatctttggtgcccgtaacaaagtgcatatcatcaacctggaaaaaactgttccgatgttcaacgacgcattagctgaactgaacaaaatcgcttcacgcaaaggtaaaatcctgttcgtaggtaccaagcgtgctgcaagcgaagcggtacaggaagctgcaatcagctgtgaccagttcttcgtgaaccaccgctggttaggcggtatgctgactaactggaaaacagtccgtcagtcaatcaaacgcctgaaagatttggaagcacagtctcaggacggtacttttgacaaactgaccaagaaagaagcgctgatgcgtacccgtgaacttggtaagttagaaaatagcctgggcggtatcaaagacatgggcggtttacctgacgctctgtttgttatcgatgctgagcacgagcacattgcaatcaaagaagcaaacaacctgggtatccctgtatttgctatcgttgatactaactctgatccggacggtgttgatttcatcatcccgggtaacgatgatgcaatccgtgcaatcaagctgtacctgggcgcagtcgcgacttctgtccgcgaaggccgttcacaggatctggctgttcaggctgaagaattagccgctgaataatctgagtccgctctctgagcgctcttattaaccaggtattgctgcaaatggttagggagccgtcatggctccctatacgcatctgatatacgaacaactccccgcagaaacagtttctgcgagctcatcgaggaaataacatgtctggaattaccgctgcattggtaaaagaactgcgtgaacgtactggcgcaggtatgatggaatgtaaaaaagcactggttgaagcaaacggtgatatcgaattagctatcgataacatgcgtaaatccggccaggctaaagcagcgaaaaaagcaggccgcgttgctgctgaaggcgttatcttatctgctgtcagcgcagatgctaaattcggcgcactgatcgaagttaactgtgaaacagacttcgttgcaaaagataccggtttcctggcattcgcacaggacatcctgaatttcgttatggctgagaaaactgctgatgcagaagctatcgttgcgaaattcgaagaacagcgtgttgcactggttgccaaaatcggtgaaaacatcagcttccgtcgtgctgctatcttagaaggcgacatggtcggttcttacatgcacggcgcacgtatcggtgttctggttgctgcaaccggcgctaacgaagaactgatcaaacacattgctatgcacgttgcggcaagcaaacctgaatataccaaacctgaagatgttcctgctgatgttgttgctcacgagaaacaaatccagctggatatcgcaatgcagtccggtaaacctcaggaaatcgcagagaaaatggttatcggccgtatgaacaaattcaccggcgaaatctctctgaccggtcagccgttcgttatggatccaagcaaatctgtcggcgatctgctgaaagaaaacaaagcagacgtgactgcattcatccgtttcgaagtgggtgaaggtatcgagaaagctgaagctgacttcgctgcagaagtcgcggcaatgagcaaataatcattgcatatcagagccgccggaaggcggttctgttttatctgcagtacccctgtttatcatccgggcatccgtccgggtatctctggcaataaattcatctgtttaggacagaacaccatggctaccaatgcaaaacctgtttatcaacgtattctgctgaagctcagtggcgaggctttacaagggaatgaaggtttcggaattgatgcgactgtacttgaccgtatggcgcaggaaattaaggaactggttgaactgcagattcaggtcggtgtcgttattggcgggggcaatctgtttcgcggcgcagggctggccgaagccggtatgaaccgcgttgtcggtgaccatatgggtatgctggcaaccgtgatgaacggtctggcaatgcgtgatgcacttcatcgcgcttatgtgaatgcgcggctgatgtctgcgattccgctcaacggcgtttgtgacaattacagctgggctgaggcaatcagtcttttacgtcacggccgtgtggttattttttctgccggaacaggcaacccattctttaccacagattctgcggcctgtctgcgcgggatcgaaattgaagcggatgtggtgctgaaagccacaaaagtggatggcgtttactcagccgatccggccaaagacccggatgcggtgctgtatgaaaaactcaactatcaggatgtgctggaacgcgaactgaaagtgatggatctggcggcctttaccctggcccgtgaccataacctgccaatccgtgttttcaacatgaacaaacccggtgcattacgccgtgtcgtgatgggcgagaacgaaggtaccttgatttcgcgtgactaaacgccgggacaccggcggaatttgacggtatcatttataaatcgattcgccaaaattataatgcgggccgcgcgacaggcacggtctgaaaaattacccgtttccaaggactcataacgtgattaatgaaatccagaaagacgcgcaggaacgcatggaaaaatgcgtcgagtcgctgaaatcccaaatcagtaaagtgcgcaccggccgtgcttccccgagcctgctggacggtatcgttgttgaatattacggtacaccgactccgctgcgtcagttagctaacgtggttgcggaagattcacgcaccctggctatcactgtgtttgaccgttcaatgtcaccggctatcgaaaaagcgattatggcctctgacctcggtttaaacccgtcatctgccggtacggttatccgtgttccgcttcctgcactgactgaagaacgccgtaaagacctgatcaaagtcgtccgcggtgacgctgagcagggtcgtattgctgtgcgtaacgtccgccgtgacgcgaacgataaagtcaaagcactgctgaaagataaagaaatcagtgaagatgatgaccgccgttcccaggacgacgttcagaaaatgactgacctgtttatcaaaaaaatcgatgatgcactggcagcaaaagaaaaagagctgatggaattctgattcggatgctgtgctgaacagaacatataaaaatagtgcccgagggcactatttttttacttatcagttgcggaaatgacttctcactctctgttgaccaaagtgctatacttttgcgattcgaaataacgataaagtaacattgagtatttatcatgaaaggtttggcaattctcggatccacaggatctatcggtaaaaacacactctcggttattcgtcagcacccggatctgttccgtgcggtggttctggcagccgggaaaaatgttcagacgatgtttgaacagtgtctggaatttaaaccccgctatgcggtgttatccgacgaagtggctgccggtgaattgcgcattcagctgaaactccacggcagtgcaaccgaggtactcagcggcagtgccgctatctgtgaagtggttcagcttgatgaagtggatcaggtgatggccgctattaccggggtggccgggctgctgccgactctcgcggctatccgcgctgacaaacgtattctgctggcaaacaaagaagcgctgatcaccagcgggcgtctgttttttgccgccatgagcaccagccgcgctgaactgtttcctatcgacagcgaacataacgcgattttccagtccctgccggccggcgtacagttatctctcgggcatgctgacctgactgccgcaggtattgattccattatcctgaccggctccggcggcccgttccgcgaaaccaccttatctgagctggccaatatgaccccggatcaggcctgtgcacatccgaactggtcaatgggacgtaaaatttccgtggattccgcgacgatgatgaataagggccttgaatatattgaggcacgttatttctttaatgcatcagcaaaacaaatggaagtgattgtgcatccgcagtcggtgatccactccatggtccgctatactgacggcagcattatcgcgcagctgggcacaccggatatgcgcaccccgatcagttattccatgagttatccgggccgtattaccgccggagctgaacgccttgattttacccgtatgggcggcctgacattcactgagccggattataaccgttacccgtgcctgaaactggcgatcgaagcctgtgatgacgggcaggcggcaaccacggcaatgaatgcggcgaatgaagaaactgtgcaggcatttttacaaaacagaatccgtttcacagatatcgcgcaaataaaccgtatggtagtggaaaatcaccggttcacggaacctcagtcaattgatgatgtccttattattgataaacaggcgcgggaactgacccgtaaatcaatcggaaaaatcgcgaagtaattaatttatattaacgggttgcgtttgtcggtgaatagcgcaagtgatatagttcagcgttgcgatttctgtaaatcagatttttaatgaccggttaataacaccatgacgttatcactgacaaacagagacaacaccgtgaacctgcacggtgtttttgtgtctgacgccatgtattaaccgatacctcaaaggattaacttgcgtgacagtatccagtgaaaatgcctcagaaaagccgggacctcagcatgtcgccattattatggacggcaacggccgctgggcaaaaaaacgcggaaaattgcgggtttccggccatcgcgcagggatcaaatcggtccgcagctcggtcagttttgccatcaaaaaccagataaaatccctgacactttatgccttcagtagtgaaaactggaaccgtcctgaacaggaagtccactcactgatggagttgtttgtctttgcgctggacaacgaagtcaaaagtctgcacaagcacaatgtcagattatctgtcatcggtgatatcagccggttcagcccgcgtctgcaggagcgtatccgccgtggtcaggtgctgaccgccaataacaccggtttacagctgaatatcgccgccaactacggcggacgctgggatatcacccacagtgtgaaacaggtgatagcacaggtgcagcgcggggaattgtccgctgaagatgtcagcgaacaggatatcagccgtcatatctcgcttcatgaccagccgccgattgatctcgtgatccgcaccggtggtgagcatcgtatcagtaacttcctgctctggcaggttgcgtacgccgaattttattttacagaagtgctgtggcctgactttgatgaaaacgcattcagcgatgcggtgacttcttttacacagcgtgagcgccgtttcggcggaaccacacctgatgatcagtctgagcaggctccgggaggaaatgttgcttaagtaccgtctaattactgccattattttaattccgctggtactgctggcgatgtttatgctcgcaccggcacatttcggctgggtggtgattgccgtgtgtggtctggccggctgggaatgggcgcagtttgccggtctgaaaggtgccggacagcgtattgtcaccggtgtgctgtttgccgccggtctggctgcgtggcagctgacactggatatgaataacctgatggcggatgctgctgtacagatcagcctgtgggcggcgctggtctggtgggtatgtgcggtgctgctggtgatcagtttcccgaaatccgccgcgctgtggaaagattctgtgattatccgcctgatcttcggtgtggtgaccattgttccgttttacagcggcatgatggtactgcgtacccagggatatgcgggcggtgatgtgtatcagggggcctggtggctgctgtatgtcatgctgctggtctgggcggcggattccggggcgtatgccttcggccgtctgctgggcaaacacaaaatggcaccgcgtgtctcgccgggcaaaaccctggaaggtctggccggtggcctgattaccgccggtctggtgtcctggctgttcagtcactattcgccgttgcagacactgccggaaaacctgattattgtgtcggtgattgtggttctgatttccgtgttcggtgatctgaccgaaagcatgtttaaacgtcagtccggcgtgaaggacagcagtcagctgatcccggggcatggcggcgtgatggatcgcattgacagcctgaccgcggcagtaccggtatttgccggtctgatcctgttagtattctccggcttttaagcacaccgggagcagacagaaaacgcatgatgacttttatctggaactcagccgcgtttgttatcgcgctggggattttggttaccgtacatgagttcgggcacttttgggtggcccggcgctgcggtatttttgtcgaacggttctccgtcggtttcggcaaagcactctggcggcgcacagacaaacacgggacagaatttgtcatcgcaatgattccgctcggcggctatgtcaaaatgctggatgagcgtgtggcaccggtagcaccggagcgtcgccatcaggcgtttaataacaaaaccgtcggccagcgggcggcggtggtcagcgccgggccgatcgctaactttctgttagccatcgtggcgtactggattgtgtttatgatcggtgtgccggcggttcgtccggtcgtggcggatatccgcgcggggtcggtcgcagaacaggcaaatattttgcccgggatggaactaaatgctgttgacggcatcgaaacgcctgactggaatagtgtgcggatggcgatgatcagtaaaatcggcgatgattttaccgttctgaatgtgattccggaaccggggtcagcaccggcggaaaaacgcctcgatctcacccgctggaaatttgatccggaaaaacaggatgctgtcctgtctctggggatcatgccggtgtccgcaaaggtcagtaatgagattaatgcactgacgcccggggggcctgctgaaaaagccggtttacaaccgggggacaggatcgttaaagtaagcggggagccgcttacggtctggcagccgtttacgctctttgtacgtaatagtcccggtaaaacgctcgatttactgattgagcggggcggagaacatattaatgtgcctctcacaccggagataaaaaacagcggcggcagtaaacaaattggttttgctggtgtcgaattaaaggttattccgctcgacccgcagtatattacggaacatcagtacgggccggtggaagcggttgccgaggcaaccgggaaaacctggcagttaatgaatctgaccgtgaaaatgatcggcaagctggtgaccggtgatgtaaaactgaataatctcagcggtccggtatcgattgcgaaaggtgccggtatttccgccgattccggcttagtgtattatctgatgtttctggcgctcatcagcgtcaatttagggatcataaatctgttcccgctgccagttttagatggtggacacctgttattcctgcttatcgagaagataaaaggcgggccggtgtctgagcgtgtacaagacttcagttatcgtattggtgtaatggcactggtactgttgatggggcttgcacttttcaatgatttctcccgcttctgattaaggaagaccgggaccggtaaggaaaacgcataacaacgatggcgatgaaaaagttgctcatagcgtcgctgctgcttggcagcttcactgcatacggttcagacggattcgtggttcaggacattcagtttgaaggtcttcagcgcgtcgccgttggtgctgcattactgaacatgcctgtccgtgtcggagacacggccagtgatgaggatatcggacgtaccattcgcgcactgttcgcgacaggtaactttgaagatgtccgcgtcctgcgtgaaggtaatgtactgctggttcaggtgaaggaacgtccgaccattgcaaatatcaccttctcgggtaacaaatccgtgaaggacgacatgctcaaacagaacctggaagcatcccgtatccgcgtcggggaagcccttgaccggacgatgctgtcaaacattgaaaaggggctggaagatttctatcacagtgtcggtaagtataacgcgacggtaaaagccgttgtcacaccactgccgcgcaaccgtattgatgtgaaattcgtttttgcggaaggtgtatccgcgactattcagcaaatcaatatcgtcggtaacactcagtttaccacggctgaactggttaaccgtttccagctgcgtgatgatgtaccgtggtggaacctggcggctgatcagaaataccagaaacagaaactggccggtgaccttgaaaccctgcgcagcttctatctggatcgcggttacgcgaaattcaatattgattcgactcaggtcagcctgacgccggacaaaaaaggtatctatatcaccatcaacgtgaccgagggcgagcagtatcagattgccggggttcaggttgcaggtgaaacggccggtcactccgctgaaatcaccgagctgaccgccattgagccgggttcactctataatggtgctcaggtcaccaaaatggagaatgatgtcaaaaatatgctcggccgttacggctatgcgtatccgcgcgtcatgacccagccggaaattaatgaagccgataaaaccgtggttctgcatgtgaatgtggatgccggtaaccgtttctatgtccgccagatccgtttcgccggtaacgacgtgagtaaagactccgttctgcgccgtgaaatgcgtcagatggaaggggcatggttaggtaacgatctggttgaagccggtaaagaacgtctgaaccgtaccggttactttgaaaccgttgaggtggaaacccagcgtgtgccgggtgtgccggatcaggtcgatgtcgtctataaagtcaaagagcgtaacaccggttccctgaactttggtgtgggcttcggtacagagagcggcgtcagcttccaggtgggtgtcacccaggataactggttaggtaccggttatcaggttggtgctaacgccagtaagaacgactactcaacatacgctgaactgtcactgactgacccgttcttcacggttgatggtgtgagcctcggcggccgtattttctacaacgacttccgtgcggatgatgcagacttgtccggttacaccaacaaaacctatggtgtggacggaacgctcggcttcccgatcaacgaaaataactccctccgtttaggtctgggttatgtgcataacaccctgtcacgtatggaaccacaggttaatatgtggcgttatctgcactcaatgggtgaagagccgaactataaagatcgtgcggaattccgtgccgatgactttaccctgacaactgcgtgggtttataacaacctcgaccgtggttacttcccgacctccggtgtgaaatccactgtgagtgcgaaagtcacggttccgggctctgataacgaatactataaactgatcgcagataccaccggctactacccgattgacgaaaacggcagctgggttgtgatgggacgcggtcgtttaggcttcggtgatggtctcggcggcaaagaactgccgttctatgagaacttctatgccggtgggtccggtaccgtccgtggtttccgttccaataccatcggtccgaaagcagtctactatgacggggcatccgataagttacgcagcgacagcccgtcccgtgatgctatcgggggtaacgcgatggcggtggccagtatggaactgatcactccgacaccgtttatcgacgaaaaatacacgaattctgtccgcacatcactctttgtggatgccggtacagtgtgggataccaattgggacaatactgagcttatgcagaagtatggtattcctgattacagtaaagcagggaacatccgtgtttctactggtgttgcgttccagtggatttctccgctcggaccattggtcttctcttatgcgaagccaatcaaagactaccagggtgaccggacagaacagttccagtttaatatcggtaagacctggtaattgcagtacagggttaccatgcgtaataaccagtacgctcagtgtgcaaagggaatctttaccattgggtttaatatccaaccagtaaatggtgtttaaggggttttattgtgaaaaagttattaactgctgccagcgtgggtatggtattagcgatgtctgccggtgctgctcaggctgctgacaagatcgcggttgtcaacatcggtgaagttgtccagaaaatgccgggccgtgaagcggcagcaaaacaactggaaagcgaattcaaaagccgtggtactgaactgcagagtttagaaaaagatctgcagacccgtgctcagaaactgcagaaagacggcgcgaccatgaaagacagcgagcgtcagaaactggcaggtgaattcgacaccaaacgtgctgacttcgcgaaaaaagcccaggcatttgaccaggatttccagaaacgtcagatggaagaacgcaacaaagtcatgaagcgtgttgaagatgcagtgaaatctgttgcttcaaaaggcggatatgacgttgtgatcgatgctaacgcagttgcttactctgtttccggcattgatatcactgctgacgttctgaaacaggttaaataattaatgtcttccattcgattagctgatctcgctcagcagttgaatgcaacgttacacggtgatggcgatctcgtcatcaccggtatcgcgcctatgcattcagcaaacagcgggcaaattacctttctgtctgatgcccgttaccgggaaaaactggctggttgtcaggcgggtgctgtggtattgcgtgaagacgatttaccgttttgtcaggtcgcggcccttgtggtgaaagacccgtacctggcgtatgcgcatatggcgcagattatggataccacaccggctccggctgagaatatccatccgtctgccgtgattgacccgtcagcctctctcggggcaaatgtgtcggtcggtgcgaatgctgtcattgagtccggcgtggttctgggtgacgatgttatcatcggcgcaggatcgtttgtcggcaaaaataccaccatcggtgccaaaacccgtatctgggcaaatgtcaccgtgtaccacgggatcgtgattggcgaaggctgcctggttcattccaacaccgttatcggtgcggacggattcggttatgccaacgatcgcggtcagtgggttaaaatccctcagctgggttccgttattatcggtgaccgggttgaaatcggctcctgtactactatcgaccgtggtgcattagaaaatacggtaatcggtaatggtgttatcattgataaccagtgccagattgcccataacgtcataatcggcgacaacaccgcagtagccggtggtgtgattatggccgggagcctgaaaatcggccgcaactgtatgattggcggagcaagcgtcattaatggtcatatggaaatctgcgatcgcgtcgtcgtgacaggcatgggcatggtaatgcggcctatcaccgaaccgggtgtatactcctccggtattccgttacagccaaataaaacatggcgtaaaactgccgcgctggtgatgaacatcagcgaaatgaataaacgcctgaaggcggtcgaaaggcagctggataacgacgataaataacagcgcattttgcggtatttttgcggcctgctaaccgcgtgacgggtatagcaggccgtgttattaataagacatatgacaaagagacaggaagagtattctgatgagtgacaaccatactctcaaaattgatgaaattttagagcttcttccgcaccggtatccgtttttattagtggatcgcgtgctggattttgaagaaggtaaatttttacgtgccgtgaaaaacgtatcattcaatgagccgtttttccaggggcatttcccgggcaaaccaatttttccgggcgttcttattctggaagcgatggctcaggccaccggcattctggcgttcaaaagcctgggtaaattagagccgggcgaattgtattattttgccgccatcgatgactgtcgctttaaacgcccggtactgccgggagaccagatgatcctcgaagtgactttccataaggaacgccgcggcgttgcccgtttcacgggtgttgcgaaagttgacggagaagttgcctgcgaagctaccatgatgtgtgcacgccgccgtgaggggtaataaatgatcgataaaaccgcccggatccacccgtcttccattatcgaagacggcgccgttattggtgccaatgtcaccatcggtcctttctgctgtattggtgcggatgttgagatcggtgaggggactgaaatcaagtcccatgttgtgattaatggtcataccaaaattggtcgtgataaccagattttccagtttgcctccattggtgagataaaccaggatctgaaatacaaaggtgaaccgacccgcgttgaaatcggtgatcgtaaccgtatccgcgaaagtgtgactattcatcgcggcaccgcgcaggacaccggcgttacccgtatcggtaacgacaacctgctgatgatcaatgcccatgttgctcacgactgtgtgatcggcaaccattgtatcattgccaacaacggaaccctggcgggtcatgtcacgctggatgattatgtcatcctgggtggcttatcggctgttcatcagttctgccgtatcggtgagcacgtgatggtcggcggctgttcaggtgtggcgcaggatatcccgccgttcttaatcgcgcagggtaaccatgtgaccgccttcggcctcaatgctatcggcctcaaacgccgtggttttgataaagacgatatcagtgcgttacagaatgcctataaagtcctgtaccgcagtaatctgacgctggcagaagccaaagtgcagttggctgaactggcgaaagaaaatgtccatgtaaaaaccttcgctgacttcctggataccgctgaacgcgggatcatccgtccgtaattgcgggggctgccatgtcggtatcacctcgtccgctcacgataggtattgtcgccggagaaacctccggcgatattctcggcgcaggtttaatgcgcgcactgaaagaaaaatatccggatgttcgtttcttcggggtcgctggtccgctgatgcaggcggaaggctgtgaaacctggtatgaaatggaagaactggccgtgatgggcattgtggaagtgctggggcgcctgccgcgtctgctctccatccgccgtgatctcacccgccgcttccgtgaactgcagccggatgtttttgtcggcattgatgcgccggatttcaatatcaccctggaaggacggttaaagtcttccgggatcaaaacgatccactatgtcagcccgtcagtctgggcgtggcggcagaaccgggtctttaaaatcgccaaagcgaccaatctggtgctggctttcctgccgttcgaaaaagcgttttacgacaaatacaatgtaccgtgccgctttatcggccacaccatggcggatgcactgccgttgcagccggacaaaaccgctgcccgtgacgcgctggggctggatccgtccgtgccgtgtctggcaatactgccgggcagccgtcacgcggaagtctcgatgctcagcggcgattttctgaaaaccgcgcaactgctgcggcaggcactgccggatttacagattgtggtgccgctggtaaatgcgaaacgccgcgctgaatttgaagctatcaaacaggaaattgccccggaactggatgtgcacctgcttgacggccgcgcccgtgatgccatgattgcctcggacgccgcactgctggcgtcaggtacggcggcactggagtgcatgctggcgaaatgcccgatggtcgtgggctatcgcatgaagccgttcacgttctggctggcgaaacggctggtcaaaacttcgtatgtgtcactgccgaacctgctggcagggcgtgagatcgtgccggaactgttacaggatgagtgccgcagtgatctgctggcaaatgcactgctgccgctgttgcagggcggtgaagccgtggataaactcagagaaaccttcctggaacttcatcagaaaatccgtcttgatgcggataatcaggcggcacaggccgtatcagatatagcgagtaattaatggattttgtttatccggacgcggcactgattgccggtgtcgatgaagtcggccgcgggccgctggtcggcgcggtggtaaccgctgccgttattcttgatccgcagaacccgatcgacggtctggcggactccaaaaagctcacggagaaaaaacgtgagcgcctgtttgctgaaattcaggaaaaggcactgtactggagtatcggccgcgcggaagcggcggaaattgatcaaatcaatattttacaggccacattcctggcgatgcagcgggcggttgccgggttgccggtgcgtccgggttttgtactggtggacggcaacaaagcgccggattttggtgtccctgctcaggcagtgatcaagggtgacggtctggtgcctgagatcagtgcggcatcgatactggcaaaagtcacgcgggatcgcgaaatggcggagctggataaacaattcccgcagtacggatttgcaaaacacaaaggttacccgacggcgctgcatcttgagatgctggcacagtatggggtgacagagcatcaccgcaccagttttggcccggtccgccgcgcgctggccggtatcagtaagtgaggatggcgtaatggcggaaccgcgttttattcatcttaatattcacagcgactattccatgattgacggactggctaaaaccggcccgctggtcaagaaagtggcgtcgatgaatatgccggcgatggcgattacggacttcactaacctgtgcgggttggtgaaattttacggcagtgcgcacggcgccggggtgaaaccgattgtcggcgcggatttcctgatggaaagcgagctgctgggtgatgaactggcgtcactcacgattctggcacgcaataataccggttatcagaacctgaccctgcttatctccgaagcctatcagaaaggctacggtgcacagggaccgaccattcagcgcgactggctggttaatcataaagaagggctgattattctctccggcgggcgcaagggggatgtgggtaagtttctgctgcgcggtaacagcgccctggtggagcaggcgctggaattctggcagacccacttcccggacagcttctatctggagcttatccgtaccggccgccaggatgaggaaagctatctgcatgctgcggtacagctggcgacagagaaatctctgccggtggtggcgaccaatgatgtccgctttatcagcagtgaggattttgacgcccatgaaatccgcgtagccattcatgatggttatacgttagcggatccgaaacgtccgaaactctacagccctcagcaatatctgcgcagtgaggacgagatgtgcgaactgttcgccgacatcccggaagcactgcagaacagcgtcgaaattgctaagcgttgtaacgtcactatccgtctcggcgagtatttcctgccgcagttcccgaccggggacatgagcacggaagattatctggtcaaacgctcgaaagagggactggaggagcgcctggcgttcctgttcccggatccggaagtgcgtgcgcagcgccgcccggaatatgacgagcgtctggatgttgaactgaaagtgattaaccagatgggcttccccggctacttcctgatcgtgatggagtttatccagtggtcgaaggataacaatgtgccggtggggccgggacgtggttccggtgccggttcactggtggcgtactccctgaaaatcaccgatctggatccactggagttcgaccttctgttcgaacgcttcctgaacccggaacgtgtctccatgcctgactttgacgtcgacttttgcatggaaaaacgtgaccgcgtgattgatcacgtagccgaaatgtacgggcgtgatgccgtttctcagattattaccttcggtacgatggcggcaaaagcggttatccgcgatgtcggccgtgtactggggcatccgtacgggtttgtcgacagaatttccaaactggtgccgccggatcccggtatgacactggaaaaagcctttgcggcagagccgcagctcggcgaggtgtatgaggccgatgaggaagtcagggcgctgatcgatatggcgcgtatcctggaaggggtgacacgtaacgccggcaaacacgccggtggtgtggtgatcgcgccgacaaaaattaccgatttcgcaccactttactgcgacccggaagggaataacccggtcacgcagtttgataaaaacgacgtggaatatgccggtctggtgaagttcgacttcctcggtctgcgtacattgacgattatcgactgggcgctgggcatgattaacccgcgcaatgagaaaaaaggcaagccgccggtggatatcgcggctatcccgctcgacgaccagaaaagctttgatatgctgcagcgctcggaaaccacagcggtcttccagcttgaatcccgcggcatgaaggatctgatcaaacgtctgcgtccggacagctttgaagacatgatagccctggtggcgctgttccggcccggcccgctgcagtcgggcatggtggataactttatcgaccgtaaacacggacgtgaggccatctcttacccggatgtggaatggcagcatgaatccctgcagccggtactggaaccgacgtacggcatcatcctctatcaggaacaggtgatgcagattgcccaggtgctggcgggctataccctgggcggcgcggatatgctgcgccgtgcaatgggtaagaaaaagccggaagagatggcaaaacagcgctcggtatttgaagagggcgcggtgaaaaacggcatcgatgccgagctgtccatgaaaatctttgacctggtggagaaattcgccggctacgggtttaacaaatctcactccgctgcctacgcgctggtttcctatcagacactgtggctgaaagcacactatccggcggaatttatggctgccgtgatgacggcggatatggataacaccgaaaaagtcgtcgggctggtggatgaatgctggcggatgggtctgaaagtattgccgccggatatcaacagcggactgtatcacttccatgtcaatgatgaaggtgagatagtctatggtatcggtgcgattaaaggtgtcggcgaaggcccgatcgaagcgattctggaagcccgtaaggacgggtatttcaaggatatttttgatttgtgtgcccgtacggacaccaaaaaactgaaccgccgcgtaatggaaaaactcattatgtccggcgcgtttgaccggctggggccgcaccgcgccgcgctgatgtcctcactggaggatgcgctgaaagcagcggatcagcacgccaaagcggaagccatcggtcaggcggatatgttcggggtactggcagaggcaccggagcaggtagagcgctcttatgccaatattccgaaatggcaggacgaaattatcctcgaaggggagcgggaaacactcgggctgtatcttaccggacatccgataaaccgttatctgaaagagattgagcgctatactcatggtttacgtctgaaagatgttaacccgacaccgcgtggtcagatgaccacggtagtcggtctggtgctggcttccaaggtgatcaccaccaaacggggaaaccggattggtgtctgtaccctcgatgatcgttccggccggctggaaattatgctattttccgatgcactggaacgttaccagcatctgctcgaacaggatcgcattctgattgcttccgggcaggtcagctttgatgatttcagcggcgggcttaaaatggtggtcagggagctgctggatatcagcgaagcacgcgaaaaatatgcgcgcgggcttgctatctcgctcacggacgggcaaattgacgaacaactgctgcaccggctgcgcggtgcgcttgaaccgcaccgctccgggacaataccggttcacctttattaccagaaggacgatgccagagcgcggatgcgtttcggtgcaacctggcgggtcaccccgaccgatacccttctgacggatctgcggactctgctgggtaatgagcaggtagaattagaatttgactaaaataggaacattatgagtcttaattttctggattttgaacagccgattgccgagttagaggcgaaaattgattcgctgaccgcggtcagccgccaggatgaatcactcgatatcaatcttgacgaagaagttgaacgcttacgggcgaagagtctggaactgacacgtaagattttcgctgacctgggtgcctggcagattgctcagctggcacgccatccgcgtcgtccgtataccctggattacgtcaaactgatctttaccgattttcaggaactggcaggcgaccgcgcatatgcggatgacaaagcgattgtcggcgggattgcccgtctggacggtcgtccggtgatgattatcggccatcagaaaggccgtgaaaccaaagaaaaaatccgccgtaacttcggcatgccggcaccggaaggttaccgcaaagccctgcgtctgatggaactggcagagcgctttaatctgccggtgatcacctttatcgacaccccgggggcctatccgggcgtgggcgcggaagagcgcggccagtctgaggcgattgcccgtaacctgcgtgaaatgtcccgcctgaaagtaccgactgtctgtaccgtggtcggggaaggcggttccggcggtgcactggcgattgcagtgggcgacaaagtgaatatgctgcaatacagcacttactctgtgatttcaccggaaggttgtgcctcgattctgtggaaaagtgcggataaagcgccgatcgccgcagaagcgatggggatcaccgcgccgcgtctgaaagagctgaaactgatcgacaatgtgatccctgagccgctgggcggcgcgcaccgtgattatgaagcggttgccgcatccctgaaagcacagatcctgtctgatctggaagagctggataaactggacagcgagtctctggctaatcgccgctatgagcgcctgatgagctacggctactgctgataaccggttgtggatactgccttttgtgaatcactgtctgccgtgttccgccgtgtgtttgcctctcagcaggcaatcctggcgggactgagcggcgggcttgattccgttgtcctgctgcatgctctgcggcagtggcagaccgctgagcgtccggcattgcggttgcgggcagtctacattcatcacggattaaatccgctggcggatgactgggcagatcactgccggacattctgcgattcactctctgttccgtttcaggtgtgccgcgtgcaggtggatccccgcaaaaaagggatcgaagctgccgccagagatgcccgctatcaggctttccgtgaagtgatagctccggatgaggcgctggtaaccgcacagcatctggatgatcagagcgaaaccttctttcttgccttaaaacgcggcagcggccctgccggtctctctgcaatgccggaacagatggcattcggtgccaatccgctgatccgtccgttactctccttcagccgtgctcagctcgaacagtatgcacaatattatcagctttcctgggtcgaggatgacagtaatcaggatcgccgttatgaccgcaattttctgcgccatgcggtattaccgcaactgaatgcccgctggccgcactttgctcaggcagtttcccgcagtgccgcgctttgcggtgaacaggaagccctgctggatgaactgctgctgccggaacttatgcagttaacggatgcggataacgggttatcttttatcccgctgctcagcgccgggacggcgaaacgcaacggcatactgcgccgctggctgaaacactgtggtgtgcagatgccgtcacagcatcagttggcactgctctggcaggaagtggcactggcgaaaccggatgcagagccgggctattatctgaaaccggtcaccatccgccgttatcagaataaactgcatgtgacagaaaaaaccgctgggttatcagactattgcctgccgtgggatctgcactctgcgctgcaactgcctgatgatgccggcattttgcggatggcggaaacggtcactacacaggatgtggcttctgtggtgcgtccgccgcgcccggatgaacaggtgactgtccgttttggtttgcaggggcattatcatatctgcggccgtgatcgcgggcgatcagccaaaaagctgtggcaggaatgcggcgttgcgccctggctgcgcgaacgcacaccgctgctctggtataacgatacgctgatagcggcggtcggggtatttgtcacgaaagagggagaagcggatgaggcaaaactgatgattatgcaggaaaaaaacaaccccgcggacggggttgcagagttattcaggacggtgagtgatcaataaccactgttcccagttcgggatgactgaagctgacaatagagtccagacgaagctcccgcagttcgttgtcaatcgtgacaacaaggtattccactttcttccggagcaccaaatcggtcgcttttcctgtcagaacatcgcccccctgtaaggtcacttccagtaccatatgatgctggcaggccagttcgaggttgtcatagtcatcacaattaattggttgatattcgttttctgcagacatattccctcaccatactttcgcttgcggtatcatccgcggatggttattcaaatagcctcatcgctcccagcagactatatcatagttatcatattggctattactgattacattttattatcggcaaaacatattgtttatcactgttttgaggaaaatcattgccattttaaaaataaaaatgcgtaattgtctgaaagcgcgtgaatatacaaaaactgacaatcattttgctaacattacctcatctgatgttcagggggaaacatgaaaaatctgacaaaactcttattggcggcaggcattttcagcattacggcctgtagttcgacagtggttgtgccaccaactccggaagtccatgttcttgaccgtgcctataacggcgtggttccgtgtgccgattgctccggcatggatgtgaccgttttactggaaggtgacggcacctatgttatgcagcgcacctatctggaaacccgcgacggcaaccagaccttctttgaaaccgggacctgggcgaaagacggcgaaaaactgcgtctgaccgatactgccgggcagcgtgcttattatgatccgcaggataaatcgctggtaatgctggatatcgacggcaacccggttaaatcggatttgaactacaccctgaaaatggtgaaaccggtacagctgaaaggtgaatatcgttatatggcggatgcggcaacgtttaaagattgccagaccggtgtggtttacgcggtaccgggcaatatcggcttagagcagggctacggcaagctgggcgttgaaggcggaaaacctgtctatctggaagtggaagggtattacaccatccgtccgtccatggaagacggccagtttgatcaggcgctgatccagaccggcaaatccgtactggataaatcacgcggttgtcagtaagttcttccggctcccgcaggcataaaaaaggctgaacagatgttcagcctttttgtattcacagcactgataatcaggcagtgatgattttctctttcagcacactgacaacgtcatccagcgcgataagagatttatcttcgctgcggcggtatttatattccaccacaccgctgtcgaggttgcgatcaccgataacgatggtatgcgggatccccatcagttccatatccgcaaacatcacacccggacgctctttacggtcatcaaagatcacttcaatgccctgagcggtcagatcagcgtagagtttttccgccacttctttcacgcggtaagatttgtgcatattcatcggcagcagagcaacctggaacggtgcaatcgcatccggccagataatcccgcgatcgtcgaagttctgctcaatcgctgccgcaacaatacgggtgaccccgataccgtagcaacccataaagaccacttcgttgtgaccggcttcgttctgaactgtcgctttcagtgcttcggaatattttttaccgagctggaagatatgaccgacttcaatcccgcgcttgatcatcagagtacctttgccgtccgggctcgggtcaccggcgaccacattacggatatccgccacttccggcagggcagcatcacgctcccagttgataccgaaatagtgtttgccgtcgatattcgcaccggcaccgaaatcactcatcatggcaacagtacggtcagcgaccaccggcagcggcagattgaccggccccagtgaacccgggcccgcattcacggctgcgcggatctcttcttctgtcgcgaactccagcggagaagcaaccagcggatgtttttccgctttcacttcgttgagttcgtgatcaccgcgcaccagcagcgcaaccagtttgtggccgctctctttgctgccgtgaacaatcagggttttgacggttttctcaaccggcagattaaactgttcaaccagctccgcgatagttttcgcgtttggtgtatcaaccagttccattgctttctgcggtgcagggcgctcagtaatgttgcagaccgcttccgccagttcgatattggccgcgtaatcggactcagaggagaaaatcacatcatcttcgccgctctgtgccagaacctggaactcgtgggatgcacttccgccgatagagccggtatctgccattactgcacggaaatccagtccgatacggttgaagattttgctgtacgcctgatacatcgtatcgtacgtctcctgcagagaatcctgagtcaggtggaaagagtacgcatctttcatgatgaattcacgggagcgcatcacaccaaaacgcggacggacttcatcacggaatttggtctggatctggaacacattcagcggcagctgtttgtaagatgtcacttcgttacggatgatgtccgtgaccacttcttcgtgcgtcggacccagaacaaactggcgatcgccgcggtcggtaatacggagcagctccggaccgtactgttcccagcgtccgctctccagccataaatctgcgggctgaaccaccggcatggagatttccagtgaaccggcattttccatctcttcacgtacgatcttttcaactttgcgtaatacgcggacaccggtcggcatccagttgtacagacctgaagcaagtttacggatcatcccggcgcgcagcatcagctgatgactgaccacttcggcgtcagcaggggtctctttcagagtagagagcagatattgggtagtacgcattatttaggttccattagaacgacaaacatgtcttatcgcagaaatattctgcgcagaagtgaagttaagcctgacagtttaccagtgactgccgcgccccaaaaggggtttagcgtttttccagactgatgacttcggtcacgccgtcacggatatgccagcggacatttaaatccagcaggtgcacggcataaattttatcgtcagcctgttgttttttatacgccggacgcggatcctgcgccagtacctgtgtgataaaacgcgccaaatcaggatattgtgcggcctgagctgttatgaattgctgcgcggcagggctgaacacgaccggcatatccgccggcggctcttcctgcgcaaaaccggccagtgcgccgggcacggattcagcatagggcagatagggtttgatatccagcaccggtgtgccgttaagcagatccaggctgccgagggagagatacgccgtatcgccgtcgtaacagacttttttcagttcaaccagcgacatcccgatcggattcgggcggaaggtggagcgggtggcaaacacgcccatttttgcattaccgccaaggcgcggcgggcgtaccagcggacgccagctgccggccggaatatcatggaaaacaaagatgacccacacatgactgaactgttccagtccgcgcacgcagtcggcgtgattatagggcgccacaaagtgcagttccccggtaccatcctcaaccagccccggctggcgcggaatcgcaaatttttcctgccacggtgagcggataaaccccacgggcgaaaatgaaaactcagacatcatcaaccttaatcgcagtaccttcgcataccgccagctgcttacaaccctgcgcggggttcacggcgcactggtggagtaacacggcatctgctttcagttttccggcccgggacagcatttgcttacgggctgccggaataccggactgtgcagggtttgccgcttcacggcaattctgacccaaaaccacaccaaggtcacggaaaggtttacccagcagttcttccgggtggagatagagtttgacgcgtgatgctgcggatgttgatttggcttttttaccggccgattttttcagccgcatatcggcgtattgcgcctgctcctgttcagaatgactctgacggaaagagcatcccgcgatgagaagagcaagcaggctgataataagcactcgcatggaaaacaatcctctggctgtacaaaacagaaaagtaagggcagatgaaatattattatttatatgatgaacatttaatgattataacaaaataaaaagggtgaacaattgttcaccctcagtgtaatattctttgattaaagataaaagaacttagcagttattctgaactcccggtcttttaccagcctttcaccgcaccgccgttgaagactttatctgcttcgttaaagacttcatcagactgatatgcctgaacaaattgtttcaccgcttcactgtctttattatcttcgcgggagacaataatgttgacgtaaggtgaatctttatcttcaacaaataagccgtctttagccggggttaagttgatctggctggcgtaagtggtgttgatcacggccaggtcgatcttattatcatccagtgaacgcggcagctgcggggcttccagctcgatcagtttcagacctttcgggttttcaaccacatcaagaactgtcggcagcagaccggtgccttctttcagtttgattaatccctgcttctgtaataacagcagtgaacggccgaggttagtcgggtcattcggcagagcgacctgtgcgccgtcctgtaattcatccagtgatttgattttctttgaataaccggcaatcggataaacaaaggtattgcccaccggagttaatttgtagttacggtctttaatctgctgatccagatacggtttgtgctggaatgcgttcagatcgatatcaccacggctgagcgcttcgttcggcatgacgtagtcgttgaacgtaaccagttccacattcaggccgtatttgtctttggcgacttttttcgccacttctgccacctgctgttcagcaccgacgatcacgccgactttgatacttttcggatctttttcattctgtccgcaacccgccagcactaatgaacccagcaaagcaccggcaacgacaagcgattttaatttaaaagccatcttttctttcctcgttctgtttaatacgcgttcgcagtcagtgcggcgcggagagagtcttatttgtgggtaacggccttaaccagacgatcaccacatacctgaataataaagaccaaaacaaccagcaatgccaataccgtattcataactactgcgttatatccgacataaccatactgataaccaatctgacctaacccgcctgcaccgacagcaccacccattgcggagtaacccacgagggtgatcagcgtaatggtagcggcgttgatcagtcccggtaatgcttccggcagcaggatcttgctgacaatctgtaatggtgtggctcccatcgcccgcgatgcttcaatcagtcctgacgggatctccagcagggcgttttccaccatacgggcaataaacggtgcagcgccgacagtcagcggcacaatggcagcctgtaacccgatagatgtaccgacgactaaccgggtaaacggaatcatccacaccagtaagataatgaacggaatcgcgcggaagatattgaccagcacggacaaggtccggtacaggcttttattatccgcaatttgcccagaacgggtgatatacagcagtacccccaccggcagaccgattaaaaatcccaggaaaccggatgcaaatgtcataaccagggtttcccagatgcctttaactaacagtaaaatcattccttcagacataaccgagaacctctgtttttacgtggtgttctttcagaaaactaatcgccgcttcaacatcttgcgggctgttaccgtccagttctgccagcatgacaccaaatttcacaccacccgcataatccatctgagaactcaggatgctgatatcaatattgaacttgcgtgatgcaatcgagatcagcggggcatcgacagactgaccaccaaactccagcttcagcagcggccccagtccttccgccggctccggtttcagacgtgccagataatcttccggcacatccagatgcagcgtggattcaataaaggcctgtgccactggtgttttcggatgagagaacacctcactcaccgtattctgttcaatcagctgtccgccgctgataaccgcaacctggtcacagatgcgtttcaccacatccatttcatgggtgatcagcaggatagttaactccagccggcggttgatgtctttcagcagttccagaatcgaacgggtcgttgccggatccagggcgctggtggcctcatcacacagcaatacctccggttcgtttgccagtgcgcgggcgatagccacacgctgtttctgaccaccggacagatttgccggataaacatcccgtttatcagacagaccgaccaggtcaagcagcttcacaacccgtttttcaatttccgccgccggtacgcggtccagttccaggggcagagcgatgttcccgaaaacagtacgggaggacagcaggttaaagtgctgaaaaatcattccgatgccgcgacgggcacgggttaactctttatcgttcatcttagtgaggtcacggccgccgacgagtacctgtccggatgtcggccgttccagcatattcacacagcggataagcgtacttttcccggcgccggaagcaccaatcacaccgtaaatctgcccttgcgggacgtgcaggttaatatcagaaagtgcctgtatttcgcgatgaccctgctgaaaaaccttatttatattcgtcagctttatcatgtaattattattaccttgttacgtgaaactggttgttcaccagatgattttcggatgttaagatgtctggacggctaagtcaacaggatttagttatcaggccgcattctcattccgcatcaaataggcgatactaaatacattattgatgacggactaagagtgtaaccatgggtatccccgcagtatttctggacagagacggcaccattaacgtagataccggctatctccatgagattgatgattttcagtttatagagaacgcgattgaagcaatgcaggccatcaagcagatgggctacgctttaatcatagtcacaaatcagtcgggtattgcccgcggtatgtttaccgaagatcagtttatgcatctgacagaatggatggactggtctctggcggatcgcggcgttgacctggatggtatctattattgtcctcatcatcccgaaggtactgtcgaagagtttcgtcaggaatgtaactgccgtaaaccggagccgggtatgctgctggatgcacagaaatttctgaagatcgatatgagtaactcttatatggtaggggataagctcgacgatatgctggccggacgggcagccgaagtgggtacaaccgtattggtacgcaccggtaaaccggtaacggaagacgccgaagcggcggcagatattgtgattaacagtatcgcggatttacctgcactgctgaaacccgtacaaaaaagcgcaaaatcacctaaaaagtaacccgattgggtgttttatctgcaaacagaaaaaaagttgaaataaacacttgcgtgatctcagcgagtgtctataatgcgccaccactgacacggaacaacgcgataacacgcggttccggcagaaagagaaaacgcggaaagttgaaaaacaacgcttgactcaaaggggctgaaaacgtaatatacgcagcctcgcaacaacgcagaagaccggcaacggcagcgaaggttgcaactgctctttaacaatttatcagacaatctgtgtgggcactcgcaggacatatcacaaaaaatattatttttgagaagtcttgaagagtgaccaatacagcagcttagaaataagcagcagtaaacagtttaattctttgagcatcagacacttttaattgaagagtttgatcatggctcagattgaacgctggcggcaggcctaacacatgcaagtcgggcggtaacagggagaagcttgcttctctgctgacgagcggcggacgggtgagtaatgtatggggatctgcctgatggcgggggataactactggaaacggtagctaataccgcataatgtcttcggaccaaagcgggggacctccgggcctcgcgccatcagatgaacccatatgggattagctagtaggtgaggtaacggcttacctaggcgacgatccctagctggtctgagaggatgatcagccacactgggactgagacacggcccagactcctacgggaggcagcagtggggaatattgcacaatgggcgcaagcctgatgcagccatgccgcgtgtatgaagaaggccttcgggttgtaaagtactttcagtcgggaggaaggtgtcaaggttaataaccttggcaattgacgttaccgacagaagaagcaccggctaactccgtgccagcagccgcggtaatacggagggtgcaagcgttaatcggaattactgggcgtaaagcgcacgcaggcggttgattgagtcagatgtgaaatccccgggcttaacccgggaattgcatctgatactggtcagctagagtcttgtagaggggggtagaattccatgtgtagcggtgaaatgcgtagagatgtggaggaataccggtggcgaaggcggccccctggacaaagactgacgctcaggtgcgaaagcgtggggagcaaacaggattagataccctggtagtccacgctgtaaacgatgtcgacttggaggttgtgcccttgaggcgtggcttccggagctaacgcgttaagtcgaccgcctggggagtacggccgcaaggttaaaactcaaatgaattgacgggggcccgcacaagcggtggagcatgtggtttaattcgatgcaacgcgaagaaccttacctactcttgacatccagagaacttagcagagatgctttggtgccttcgggaactctgagacaggtgctgcatggctgtcgtcagctcgtgttgtgaaatgttgggttaagtcccgcaacgagcgcaacccttatcctttgttgccagcgcgtgatggcgggaactcaaaggagactgccggtgataaaccggaggaaggtggggatgacgtcaagtcatcatggcccttacgagtagggctacacacgtgctacaatggcgtatacaaagggaagcgaccccgcgagggcaagcggaactcataaagtacgtcgtagtccggattggagtctgcaactcgactccatgaagtcggaatcgctagtaatcgtagatcagaatgctacggtgaatacgttcccgggccttgtacacaccgcccgtcacaccatgggagtgggttgcaaaagaagtaggtagcttaacctccgggagggcgcttaccactttgtgattcatgactggggtgaagtcgtaacaaggtaaccgtaggggaacctgcggttggatcacctccttacctatgttgatttgaattgtgagtgttcacacagattgtctgatagaaaatgagcagagagcgtctgcgaagctgactaatgtccccttcgtctagaggcccaggacaccgccctttcacggcggtaacaggggttcgaatcccctaggggacgccagtctgcgcggatgagtgaaagttatctgcaaataatgattaagctgattcaagagtcagcttaacaattatgctctttaacaatccggaacaagctgaaaaattgaaacaatcaatattatcaccgaggtaatattgatgagtctctcagccgaacaactttgaacgtgttcttcagtgtaagacgcggcgagcgaagtgatttcgcgaaggccggagcgcagtgagcgcagcatactcaggtatgtgagcatcacgagcaccgcccgacaaagaaatcacaaagcgcagtccgtcgcattaagacaccttcgggttgtgaggttaagcgaataagcgtacacggtggatgcctaggcagtcagaggcgatgaaggacgtgctaatctgcgataagcgccggtaaggtgatatgaaccgttataaccggcgatttccgaatggggaaacccagtgcaattcgttgcactatcattacctgaatacatagggtaatgaagcgaaccgggagaactgaaacatctaagtaccccgaggaaaagaaatcaaacgagattcccccagtagcggcgagcgaacggggagcagcccagaaccttaatcactatcagcatcaggagaacagtctggaaaggctggccgcagcaggtgatagccctgtatccgaaggtgttggtagtgtgagttcgatgagtaaggcgggacacgtgttatcctgtctgaatatggggggaccatcctccaaggctaaatactcctgactgaccgatagtgaaccagtaccgtgagggaaaggcgaaaagaaccccggcgaggggagtgaaaaagaacctgaaaccgtgtacgtacaagcagtgggagcacccttcggggtgtgactgcgtaccttttgtataatgggtcagcgacttatattctgtagcaaggttaaccgaataggggagccgcagggaaaccgagtcttaactgggcgaattagttgcagggtatagacccgaaacccggtgatctagccatgggcaggttgaaggttgggtaacactaactggaggaccgaaccgactaatgttgaaaaattagcggatgacttgtggctgggggtgaaaggccaatcaaaccgggagatagctggttctccccgaaagctatttaggtagcgcctcgtgaattcatctccgggggtagagcactgtttcggctagggggtcatcccgacttaccaacccgatgcaaactgcgaataccggagaatgttatcacgggagacacacggcgggtgctaacgttcgtcgtgaagagggaaacaacccagaccgccggctaaggtcccaaagtcataattaagtgggaaacgaagtgggaaggctcagacagccaggatgttggcttagaagcagccatcatttaaagaaagcgtaatagctcactggtcgagtcggcctgcgcggaagatgtaacggggctaaattatgcaccgaagccgcggcagcgatatgtaaatattgttgggtaggggagcgttctgtaagcctgtgaaggtgtgctgtgaggcttgctggaggtatcagaagtgcgaatgctgacataagtaacgataatgcgggtgaaaaacccgcacgccggaagaccaagggttcctgtccaacgttaatcggggcagggtgagtcgacccctaaggcgaggctgaaaagcgtagtcgatgggcaacgggttaatattcccgtactggtggtaactgcgaaggggggacggagaaagctaaatcatccgggcgacggttgtcccggtttaagcgtgcaggtggactgaccaggcaaatccggtcggttgttaacactgaggcgtgacgacgagccactacggtggtgaagtgattgatgctctgcttccgggaaaagcctctaagctccaggttaccattaatcgtaccccaaaccgacacaggtggtcaggtagagaatactcaggcgcttgagagaactcgggtgaaggaactaggcaaaatggtgccgtaacttcgggagaaggcacgctggcattaggtgaagtggtttacccacggagctgaagccagccgcagataccagctggctgcaactgtttattaaaaacacagcactgtgcaaacacgaaagtggacgtatacggtgtgacgcctgcccggtgccggaaggttaattgatgaggtcagccgcaaggcgaagcttctgatcgaagccccggtaaacggcggccgtaactataacggtcctaaggtagcgaaattccttgtcgggtaagttccgacctgcacgaatggcgtaatgatggccaggctgtctccacccgagactcagtgaaattgaactcgctgtgaagatgcagtgtacccgcggcaagacggaaagaccccgtgaacctttactatagcttgacactgaacattgagccttgatgtgtaggataggtgggaggcaacgaagtgtggacgccagtctgcacggagccatccttgaaataccaccctttaacgtttgatgttctaacccgggtccataatctggatcggggaccgtgtctggtgggtagtttgactggggcggtctcctcccaaagagtaacggaggagcacgaaggttggctaagcatggtcggacatcatgcggttagtgcaaaggcataagccagcttgactgcgagagtgacggctcgagcaggtacgaaagtaggtcttagtgatccggtggttctgaatggaagggccatcgctcaacggataaaaggtactccggggataacaggctgataccgcccaagagttcatatcgacggcggtgtttggcacctcgatgtcggctcatcacatcctggggctgaagtaggtcccaagggtatggctgttcgccatttaaagtggtacgcgagctgggtttagaacgtcgtgagacagttcggtccctatctgccgtgggcgctggaagattgagaggggttgctcctagtacgagaggaccggagtgaacgcaccactggtgtacgggttgtgatgccaattgcattgcccggtagctaagtgcggaagagataaccgctgaaagcatctaagcgggaaacttgcctcgagatgagtcttccctgaccctttaagggtcctgaaggaacgtttgagactaagacgttgataggctgggtgtgtaagcgcagcgatgcgttgagctgaccagtactaatgaaccgtgaggcttaacctgacaacaccgaaggtgttttgagttgagagacgaaagaatttttcagcatagtgacagagcataaagccggtcactatgaaaagcttgttttggattgaaatgaattgcctggcggccgtagcgcggtgtccccccaccccctctcagaagtgaaacgccgtagcgccgatggtagtgtggggtctccccatgtgagagtagggaaccgccaggttattattaagtgaagaagccaccctttgggtggcttttttgtgtttgggcgaaaagaaaaaatatttttcacctgaatacgtgttctgaaccggatagcatgaatcaaagtttgctaagatagtgacggacagaagcaaacagtatcggggttatcgttgaaagagaaaaaaaactggtccgtccggtatgtcgcagggcatccggcacgacaaatcccccccatgtcggcagacatgctgggtaacggattgccggttggtttaccattatccgcaccggaacaaactatccgcgttgtggtctggaatatctataagcaacagcgtcctgactggcgcaaaacccttgatcgcattttgcatgacacacaactggtcctgcttcaggaagcacagccttctcctgaactggtcagcctggccggaaaacaccagcttgttgctgatcaggttcccgcgctgcattttcagcagcatccttccggtgtgatgacactggcaacctcccatccaatctattgctgcccgttacagcagaaagaacccttattgcgtctgcctaaatccgcattagttactgtgtacccgttgccggatggccgtcagctgatggtgattaacgtccatgctattaatttcagttttggtgtggatgtttaccggcgccagctgaatacggtcggctctcagatccgctgtcatatcgggccggtgatcctcggcggtgattttaacgcctggagcaggcagcgcatgaatgccctgaaacgttttgcccgtgcgcagggcctgaaagaagtgctgtttccggatgatatccggacaaaagcatttggtcacccgctggattatctgttttatcgcggatttaaactggttttatcggacgttatgcagacagatgcttcagatcactatcctttaattgctgagttcatgtaaaaatatctgatgatattgtttatcactgttatcattaagtaataatattaatgcaatattatttatactaactatagttatctggttgttattgcctggtgttatttattattaactaattaagtaataaaaccggagactctatgcagcgtattgttattgttggcggcggcgccggcggcacgatggtcgcaaatattctgaccagaaagctgttaaatgatatttatcagaagaaagtggaagttgtccttatttcagacagtgaatggcactattataaacctgcgtttatgtatgtggcttttaatctgtatctgaaagaggaattacgaaagtcacaacgctctctgcttcgccccgaaattcagtttattcacgaccgtgtcgagcattttgattttgcatcacagacgctgcagggaaagagcggcaccaaatacggatatgactacctggtgatcgcgaccggctgtcagccgagaccggatcggatctccggaatgaaagaagctgccgatcatttctatcagtatcaacccgctcgccagttggctgaaaagctggcaaaattcgaaaaaggccggatttttattacggtttctttcccgaataccccgaatgttcctcaccagtgtggtatcgcaccgatggaaaccacgctgatgctggatgattatttccgtcagcgtcgtgtccgccaggatatcgaaatcgtttatacctatccgacagtatctcagttattacgtaactgcctgtttatgcagaaagatgtctgtgaagtcctgccggcggtctttcaggagcgtaatattcaggctcagcgcggttttaccctggagcgtgtctgccctgaaaagaaaattgcgtattccaaagaaggggaagagcagccgtttgatctgctgataggtacgccaccgatttctgcggtggaatcggtacgtaataccggattatccgacggcgatccggaagagggctggctgccgacagatccggaaacgttgcaggtgtacggactgaaaaacgtgtatgtcctcggggatactgtggatctgcctatcagtaaagcggccggcagttgccataaccagtcgactgtcgtggtggataatattatcggcgagatgcgtttcggctataccaccgccatttatgacggacgggttcaggcagtcgcccagatggggctgaatgcagggatgccgcttcagtatgattataagcatgatgtgttaccgacaccggcgacaaagctgggtggcctgctgcgtaccggttttaaccgcgggctgtactggtcaaccgttcgcggcctggtataacagaggaaactgcaatgtctgcaacagaacagatgaatgaacagactgctgcgccacagcctgaattatccgcacaaacagcggaaaaactggcggtattaatgcagctgaaccgctttgataatgtgattgatttgctgtctctggtctcggatctggtcgatattatcggcaagaatgaggtcaataaactggcggataatgcggaatcaggtatcgcattattgtgggaaagcggactggcgctgaacaaggccaaaatggaaatgatgtacagtgatgaaaagtacaatttccgtaatacctataaattactgaaagatcaggacacgctcaaaggcatcaatatggtgctcagaacgttacagattatgggctcccgtattcagcgtatcaacagcgaaccctgataccggacataaaaaaaccgggtgtatgattcacccggtttcgtgttttcagaacagtgagttgtctgtttatacccgttttttcacaccggcaaaataaccaacagtcagaattaccacccaggcaatccccaccatcagtgccacacgtgtatccgggaagtaacccagaagggcgatcacaaagaccataaaggcgatggtcagagcgggcgcaaccggccacatcggtacagggaatttcagggttttgacctcttccggtttcatcttacggcgcattgccacctgagataacagaatcatcagccagacccagacggtcgcgaaggttgcgatagaggcgataatgatgaagattttttccgggatcaggtagttaagcaccacgccgaccagcagaactgcactcatcaccagaactgtcatccacggcacaccgtttttggtgagcttcataaaggatttcggtgcctgaccttcctgcgccatgccgtacatcatccggcctgcaccgaagatatcactgttaatggcagaaacggctgcggtgatcaccaccaggttcagaatgttggccgcgtaggagatattcagtttctcgaaaatctgcacaaacgggctgccgttatggccgatctggttccacgggaagatacacatcaggataaacagtgtcagcacatagaacagcagaatacgcagcggtactgcgttgatcgctttcggaatggttttttccgggttttgtgcttcactggcagtgataccgatcacttcaatgccgccgaaggcaaacatcacaatggccagtgaggctattaccccgcttattccgttcggcataaagccgccgaattcccataagttactgataccggtcggatgggcggtttcctggccgaagccgaacagcataatcgccgcgccgccgacaatcatggcgataatcgcggtcactttgacaatcgagagccagaactccatctccccgaatatcttaacgtgacataaattcagcgcgccaatgaaacacacaatccccagtacccagatccactgatcgacatccgggaaccagagcttcatatagaagccgaaggcggtgacgtccgcgagacagacaatcagcatttcaaaaacatagttccagccggtgaggaacccggcgagcggccccatataatggctggcatattgtgaaaatgaacccggtaccggatggtggactgccatttcgcccagcgcacgcatcaccataaagactgccgcacccccgataaggtaagccagcagaacagcaggacccgcctgctcaatagaggctgccgagccgtaaaacaggccggtgcctatcgccgatccgagtgccataaagcggatgtgccgccctgtaagcccccgtcgtagcgccgtattattttctttcatgtaattaatcctgtcgctgtcatgattagcagcgtttttactgatgtgaaacgcggtcagagtcaacccggtactttaacataaagagtcatgctgacgggataattatctgcaataatacggccttaaacgtaaggaacagatgagtgatgcaataccctattaacgaaatctttcagacattgcagggcgaaggggtttttaccggcgttccggcgatttttgtccgcttacagcgctgtccggtcgggtgcagctggtgtgataccaaacatacctgggaacagttaccggaaaaagtctgttcagcagaagacatgatgagtaaaacagaggaggacgaccgctgggcctctctggatgcagacagcattattatgcagtttgaggcgaaaggttatacagcccgccatgttgtgatcaccggcggtgaaccgtgtttatatgatttgcggccgctgacggcggtgctcgaagcgcggggttatcagtgccagattgaaaccagcggtacacaaccggtgcagtgcagtgagaaaacctgggtaaccgtttccccgaaagtgaatatgcgcggcggttatgatgtgctgacaccttcactgctgcgggctgatgaggtgaaacatccggtcgggcggcagcgggatattgatgaactggatttattgctggcgaaactgccgggggataaacagccggtggtggcgttgcagccgatcagtcagaaaccggcggccactgctctctgtattgagacctgcatcgcgcgtaactggcgtttctcgatgcagactcataaatatcttaatattgcctgattattcaccgcggtaaatacagccggcggtacaggtctctttgaccagcacggcactcagcatcggcagcagcggtttggtctgctgccagatccactccgccagcacttcactggtcgggttttccagccccgggatctcattgaggtagtgatgatccagacggtcataaatcggtttaaatgcctgtttgacctcagcaaaatcgatcagccagccggtatgtgcatccacctcaccactcagctccagacggacaagaaaggaatgcccgtgcagacgcccgcatttatggccttccgggacatgcggcaggcggtgggcggcttcgaactggaactctttaaaaatcgtggtgctcataactctctccggataatgacggtatggcataataaaagcgtcattttacgcaatattcagtgaaaatgttaccaaaaaacagcaaagtggcgaataaataacagaaatgccctgctatttttcatcgacaaaaccggtacttttctctatgttggaacgtcagaataataacgaatacactcatttaccgggtttactatgacatcgccgatcacaacctctccgctctccgcgcctgactggcagcacctgcaacccttacttgacagactgactccgcaacagctgaattggttatcggcctggtgccgtgaacgggcagcgccgtctgcggcggaacgggaaccggcggatattttgctgatcgccgcatctcagaccggtaacgcccggcgtgtggcggaatccctgcgggatcagttgttcagtgcgcagcgggcggtacgtctggtaaatgccggagatctctcactgactgcatttccggaatcaccgctggtagtgcttatctgtgccaccaccggggatggtgatgcaccggaagaagccctgccgctgtttcatttccttcattctgttcaggcaccttcgctgacaaaaatccgttacgcggtgctggcgctgggtaaccgggcgtatccgcagttttgtcaggccggaaagaattttgataaccgcctgcatgccctcggggcgcagcggatcctgccgcgtgcggaagcagacagcgattatcaggttaccgcagataactggatctctcagttactccctgagctgctgaatctgacaccgccggcagatgaagagcggctcagccgcttcactcacaatacggtggtgcagattgattcacagccgcatcagcgtgataaaccacagtctgcggttttgcgccgcgctgtgcgcctgaccgcaccggaatcggaaaagcatgtctgtcagattgtgctggatatccgcggcaccgggttgcagtatcagaccggtgatgcgctgggtgtgtatccggaaaacagcccggagctggtcagtgagctgctgggactgctctggtttgacggtactgagcgtgtcatgctgaaagggaaatcgtattctctgcgtgacgccctgatgacgcagtgtgagctgaccatcaacagtgcaccggttgtggcggcttacgcccgcctcagtaacgcgccggaactgctggatatgattgcggatccgcagcaactgatatcgtacgcacagcgcagaccggtggcggatatggtgcgtgagtttgccgtgcagacctccgcacaggcctgggtggattgcctgccgccgctgatgccgcgtttatactccatttcctcgtcgccgctggtctcaccggatgaagtgcatctgaccgccggggtggtggagttccggactgacgggcgtacccgctacggtgcggcaacccgttacctgacgcatcagttacagcccggggatacggttgcctgttttgtggaacacaatgatcacttccgcctgccggatgacccggaaaaaccggtgattatgatagggccgggtaccggcattgcgccgttccgtgcgtttcttcagcagcgtgcggctcagcaatccggcggaaaaaactggctgattaccggcaatccgcatgaaaaaagcgattttctgtatgagacagagctgacagattttgtgcgtcagggcgtactgacggagctgacaaccgcctggtcgcgggatcagccgcagaagatttatgtgcaggataagctgtctgaaatgcgggaaaccgtctggcgctggctggagcagggcgcgtacgtatatgtgtgcggggatgctttccggatggcaaaagacacggatgccgcattactggatattatccgcagtgaaggggcgatgtccgcagaagaggcacaggtttttctgaacggattacggacagcaaaacgttatcagcgggatgtttactgatcttctgtccgaataacggacggaacagtagcatctgcgccgatcttatgggaagattagccgatcttttcgggggcggtgatgggcaaactgacgctattacttttagttattctgggctggctgcaatattcattgtggttagggaaaaacggtattcacgactatgtacaggtcagtgaagatgttgctgcatcagaacaggtaaatgcgaagctcaaagcccgtaacgaacagctgtttgctgagatcggcgatctgaacgacgggcttgaggccatcgaagagcgcgggcgcagtgaattaggcatgatcaagcccggcgaaagcttttaccgggtcctgtccgaaaaacggacacagcagaatgcgcagccacaaagtcgcagtaactaatccttatgacaatactttcttccgcaatgaccggcgcacaaccggcaccggatctgtccggtatttctgatgatgctccggtcacggcgctgatcccggccgccggtaccggtacccgcatgcagtgcgaatgccccaagcaatacctgattattgccggaaaaaccattctggaacataccctcgctattctgctggaacacccgcgcatcacacaggtggtcgtggcgctgcatccgcaggatacggttttcagtacattaccggtcgcgcggcatccccggatccgaactgtcaccggcggtggtgagcgcgcggattctgtcctggccggtctcgattatctcgctgagcatactccggaaaacagctgggtgctggtacatgacgcagcgcgtccctgtctgcaactgacagatctgaaccggctgctggccgtgatgtcagacacacaaaccggtaaccgcgtgcagggggcgattctggcctcaccggtacgtgataccatgaagcggggtgtggcatctgccggatataccggtattgatcacactgttgagcgcacacagttgtggcacgccctgaccccgcaatttttcccgcttcatctgctgcgcacctgtctgcagcaggcgctgtctcagcaggcagtgatcactgatgaagcctccgcgctggagttttgcggctatcagccgttgctggtgcccggccgcgcggacaatattaaagtcacacagccggaagatctcgcacttgccgggttctacctgtccaataacaataaggaacagacaacatgatgagaatcggacacggttttgatgttcatgccttcggcggcgaaggcccgattgtgattgcgggcgtccgcattccttacgaacagggattactggcgcattccgacggtgatgtcgctctgcatgcggccaccgacgcattgctgggtgcggcggcgctgggggatatcggcaaattattccccgatacggatccggcctataaaggcgcggacagccgtgtgctgctgcgtgaggcattccgtcgtattcaggaaaaaggctacagactgggtaatctggatgtcactattatcgcccaggcaccgaaaatgctgccgcatatcccgcagatgcgggtgaatctggcggaagatttgcagtgtcatatggatgatatcaatgtgaaagccaccaccaccgaaaaactcggtttcactggccgcaaagaagggatcgcctgtgaggcggtagcgctgcttgtgaaggctgaagcatgagtctcccggtcagttatttccacggtaaaccagcggccaccggggtactgaaagcacagccggaagattttttggtgcaggaagatttggggtttgaacctgacggtgacggcgaacatgtgatggtccgtatccgcaaaaccggctgtaacacgcggtttgtggcggaagaactggccaaatttgcgaaaatcgccgcccgtgctgtcagctacgccgggctgaaagatcgccatgcggtcaccgagcagtggttctgcctgcagatgccgggaaaagaaacaccggatttcgcgcagatgcagcttgaaggctgcgaagtcctggcggttaaccgccagaaacgcaaattacggatcggtgcgctgaaaggtaatcagtttactattgtgctgcgccggatcagcgatcgcgccgcgacagaacagcgtctgcagcagattgcgcagtccggggtgccgaattatttcggtgagcagcgtttcgggcgcaacggccagaatctgcatttcgcacagcgctgggctgacggcgaaatcagtgtgaaagatcgcagcaaacgcggtttttatctctccgctgcccgcagtgcgatgtttaacgcggtggcggacgcccgtctgacacagcagcttcaggcaaccgcattgcagggtgatgcggtacagctcgccgggcgcggcagctggtttgcggttcaggcggatgaactggcggatgtacagcagcgtctggataaccgtgaactgcgcattacagcgccgttaccgggcaagggtgatctggggtctcaggatgcggcactggcctttgaaacaggacagctggcaccgtggcaatcactgtggcaactggcggaaaaagagggggcggataatgcccgccgagcgctgatgttgtatccggagcatttcacatctgaatggatggatgatgaaaccgtccgtttatccttcttcctgccggccggcagttttgccaccagtgttatccgcgaaattattgagctggaagcggatcaggcggcggaattcagtgaataatcaacagactgattaacataaaaaaggggcggaaattattccgccccttttttcgttctgttttttattcaggttttgctgcggcggctttgtctgtttccgccagcaattcagtcagatacactttggcatccaccggatctttgcccggcagttttacctgatacggcttaccgctgatggaggagccggatgccactttatccacaaactgttctgcggtgctcagacgttttttcgttttgcttaatttcaggcacagatgtgattccgcgtcggcggcattatgctcactgccgttgcggataaaaatcagctgttcctgcttcccgacagcggtcagcaggttttccactctggtctcttcctgaggtgacagcgcgaatgcctctgataccagaagcagtccggcagtcagtgcggtgaacagggtagctgtgattcgtttacagatagccatgcagaaatcctttcagtcataaataatacaagtatcatgcagctgaatatgaaaaaagcaatcagactaaatctgttataacccttttttatcgcggctaacttgataaaatagttttctgtcgtgataaacgagctgttactgataaaaaaggataccgttgtgctgcgaattctggtgagtaatgatgacggcgtcagtgcgccggggatccggacattgtctgaggcgctgcggcgcacttaccatgtgcaggtggttgcacctgatcgcaaccgcagcggggcatccaacgcgctgacactcgaccgcccgctgcgtacggtagtgcatgagaacagcgatattgcgctggtggaaggcacgccgacggattgtgtctatatcggtgctaatctgctgatgcgcccgcgcccggaaattgtggtttccgggattaactgcggcccgaacctcggggatgatgtgatctactccggtacggttgctgcggcaatggaaggacgtcacctgggattaccggcgattgcggtctccctgaacggcgaaacccattatgatacagcagcggaaattacctgccgtctgctgaccatgctgcagcaagtgccgttacgggccggtaatattctgaacgtgaatgtgccggatgttccgctcagtgagatcaaaggaatgaaagtgacccgctgcggaacgcgccgggcaccggatgtggtctacacacagatggatccgaaaggaaatccgctgtactggctcggccctccgggggaaaaactggacaccgggccggataccgatttcgcggcggtggatgcaggttatgtctctgtcacgccgctgcatgttgatctgaccgcctacagcgtgcaggaaaaattagaagactggttacaaaaagcaggggtgatacaggaatgatccgccgggtggtacaggatctgattacacagttacgtcaggccgggatccgcgatgaacgtctgttacaggcgatggcggctgtcccgcgggagaattttgtcgatgaggcgctgacacacaaagcttacgacaataccgcgctgccgattggctacgggcagaccatctcccagccgtttatggtggctaagatgacagaactgctggatccggctccgcaggcgcatgtgctggaaatcggcaccggctccggctatcagacggcgatcctcgcacaccttgcggcgcatgtttactctgttgagcgggttaagggactgcagtggcatgccaaacgccgctttaaacagcttgatctgcataatatttccacccgtcacggtgacggctgggaaggctggccgtcccgtggtccgtttgacggcattattgtcaccgccgccgccagtgatatcccgccggcgctgctcagtcagctggcggataacggccggatggtgataccggtgggggaacagcagcagatgcttaaactgatccgccgccggggcaatgattttcatacccaatcgatcggaacagtccggtttgttcccctgattcacggcgatctgggataaaaatggctattttggtaacaagactttttcatttcgcttagtatctgttttaataatacaatcctgccatgtggcctgcggccgcgtggtgactttctgattgtcagttttcgcactatttccagtttcgggagaaggaatatgaactcaagaaaccctatgaaaacaatacgatgggttgcaattgggtcactgatgagcacggttctggccggatgctcaacgccgtatcatgccgcaccaatcagcagtgtggacgaaagcagcagtgcaccggtaatgacagcaggcaatgataacaacagtacatctgtgtccacaccgatgccggtacgtcctcagctcagttccgccaataacacacagccggtcagccggagtgtgcagcagccgcgctctgccaatgtgcagaccagcagcgatggccggattcagtacaaccgtaattatgatgcgatcccgaaaggcagttacagcggaaatacctatacggttcagcgcggtgatacattattttacatcgcttatatctccggatctgacttccgcgaactggcatcacagaacaatattcctgagccgtacagcctgaacgaagggcaggtgattcggttaagcaacggcggcggcaacaatgttgcaccggtcagcagcggtactcaggtcgcaacaaataggaatactccgcaaaacggggtggttgattctcaaccaactaatgcgtattctgaatctgcaggcgctaaaccggccggcggtaagatgctctcatctcaggtcaccgcacaggcaaaagcgaataacggcactgccgccaccacagcggcaacaaccgcagccgttaccgcaccggcaacaacaaccagcgcgcctgtcgccgtaaatagtggttcctttaaatggggctggccagcggaaggcaaagtcatttccaactacacaggacctaccagcggtaaccgaggtattgatatcggtggtacacgtggacagcctgtttttgcttcagcgccgggtaaagtggtgtataccggtaatgcgttacgcggctacggtaatctggtcatcatcaagcacaatgatgatttcctgacagcctacgcgcataacgattccatcctggttaaagatcagcaggacgtcgcagctggtcagaaaattgccacgatgggcagcagcggaaccacatctgtaagattacactttgaaattcgttacaagggaaaatcagtcaacccgctgcagtacttaccgcagcgataaacggcagaacagcttgttctgcctgaattatcggggtaggagcaagctgatgagccgtaatccactgaacgctaacgagttatacgacgaaaattttgccgccgggcaggatgaagatgaagagctgtttgatgagaagcagctggcagaggagagcgaatctgacgatcccggcccggacattgagttcgtgcagagtgtcagccagcgtgtcctggatgctactcagctttatcttggtgagataggcttttcaccgctgctcagcgcagaagaagaagtcttttttgcacggcgcgccctgcggggtgataccgcagcgcgccagcgtatgattgaaagtaacctccgtctggtggttaagatttcccgccgctacagtaatcgcgggctggcgctgcttgatctgatcgaagagggtaacctcgggctgatccgcgcggtggagaaatttgatccggagaaaggcttccgtttttctacctatgcaacatggtggatccgtcagactattgaacgggctatcatgaaccagacccgcaccatccgtctccctatccatattgtcaaagaactgaatgtctatctgcgcaccgcccgtgagctggcacaaaagctggatcatgagccgacagcggaagaaattgccgagcagctggataaaccggtagatgatgtcagccgtatgctgcgtctgaatgagcgcatcacctcagtggatgtcccggtgggtgcggattcagataaagcactgctggatattctgtctgacgaaaatgatgtcacaccggaaaaccggctgcaggataacaacatgcagcagagcattgtgaaatggctgtatgaactgaatccgaagcagcgggaagtgctggcgcgtcgttttggtttgctgggctatgaggcggagacactggaagatgtgggacgcgagattggtttaacccgcgaacgtgtgcggcagattcaggtggaaggtttacgccgcctgaaggatatcctgcacaaccacgggttatgtgagaattcactgtttaactgagtgatccgtaaaacagcgttctcagagcagttataaatattattcatgtaaaagggggaatttattccccccttttcttttgtccggctgtcagagcatctctttcaggcggtagagccagtccagtgcctgacgcggtgtcagtgaatccgggttaatccccgccagcgcatccagtgccggagccgcttcctccgggttatccagcagattcatttgcggtgtttccacatggcttgccgttgcattcagtgacagcgattccagctcgcgcaacttctgcttcgcgcgtttaatcacatcacgtggcacgccggcgagcagggcgaccgcaaggccgtaacttttgctggccgcaccatcctgcacactgtgcataaaggcaatggtgtcgccgtgctcaaccgcatccagatggatattggccacgccttccagtttttccggcagcgtggtcagctcgaaatagtgggtggcgaacagtgtcagtgctttgatacggttcgccaggctttccgcacaagcccaggccagcgataaaccatcataggtggatgtgccgcgcccgatttcatccatcagtaccaggctctgctctgtggcgttatgcaggatattggcggtttcggtcatttccaccataaaggtggagcggccggaagcgagatcatccgatgccccgacgcgggtgaaaatccgatccaccgggccgataacggctttttccgccggtacaaaactgccgatataggcgagcagtgcgataagcgctgtctgccgcatataggtactcttaccgcccatgttcgggccggtgatgatcagcaggcggcgctgtggtgacatcgtcagcgggttggcgataaacggctctgtcagtacatgttcgacaacagggtgacgaccgccggtgatctgaataccgactttatccgtcagttgcgggcaggtgtaattgagggtttccgcgcgctcggccaggttggtgagcacatccagttccgccagggtatcagagctgagctgcagagcttccaggtgcggaagcagcagatcaaataactcatcataaagggctttttcaatcgccagcgctttgcttttggaggtcagaaccttatcttcatactctttcagttccgggatgatgtagcgctcggcatttttcagggtctgacggcggacgtaatggatcggtaccaggtggctttgtccgcggctgacctgaatatagtaaccgtggacaccattaaacccgactttcagtgtatcgatgccgagtttttcccgctcgcggatttccagtttatcgagataatcactggcaccgtccgccagtgcacgccactcatccagctcttcattgtagcccggggcaatcacaccgccgtcacgcaccagtaccggcggcgcttcaacaacggcccgctccagcagagcctgtaattcgtcaaactgaccaatacgctgttgcagtgtctgaatatacggatcagatactgcactcagctgtgcctgaatatccggatactgtgaaaaagcatggcgcatccgcgccaggtcgcgcggacgggcggtgcgcagtgccagacgtgccagcactcgttccagatcgccaatctggcgcagaaccggctgtaaatccgggctgatttccatcagcgcggcaatcgcctgctggcggttggcgagcacggctctgtcacgcagcggggagtgcagccagcgcttgagcatccggctgcccatcggggtgacacacagatccagtacggacgacagggtattttcggtgccgccgctgaggttctgggtaatttccagattgcggcgcgtggctgcatccagaatcacattttcctgcagattttccagggtcacactgcggatatgcggcagcgaggtgcgctgggtatctttgacatattgcagaagacatccggcggcctgtaaggccagcggagcattttccacgccgaagccgtgcaaatcccgggtgccgaactgtaatgtcagctgctgacgagcagtttcgagctcaaattcccacaacggacggcggcgcagccctttctgattctgaataatggcgaaatccgccatatcttccgggtagagcagctctgccgggcgggtgcgctgtaattccgcggccatcgcgtctttatcgtctaactggaggatacggaaacggccggatgtgatatccagagtggcgtaaccaaagccgcgcgcatcctgccagacagcggcgagcaggttatcctgacgctcctgtaacagcgcttcatcactgaccgttcccggtgtgacgatacgaatcactttgcgctccaccgggcctttgctggtggccggatcgccgatttgctcacagatggcaacggattccccgagctgaaccagttttgccaggtatccctcaaccgcatgatgcggcacaccggccatcgggatcggctgaccggcggtctggccgcgtttggtcagtgaaatatccagtaactgtgctgcccgtttggcatcatcaaagaacagctcatagaagtcacccatccggtaaaacatcagaatatccggatgttgtgccttgagccggaagtactgctgcatcatgggtgtatgggagtcaaagttttggttgtcagtcataaggattctgttaacactctgaaagagttacggtttatcaactgcccgttcccgggattgtcttcattaatatgcttaaaataacacagattatgatgaaagaggggattccttcctgtaccgcggtgaattattgaaaagggtggaggaagatcgcaaaaccggggaagtcagacgggtatcacggtgctgatgctgaaaagccacgtaatgaaaataacgtggcttttgcagggagacagcaggaatctactattttattatcagacatattatcttataaccaggattcaggacttataacagttaaattctatccatgaataataactgtttctgaataatccggatataataaattaaagcctcccgtaattacaacttattttgatgtttttaatgctaaagtaatattggtttttattaaaaagaaattgaataaatactatagcggcctttgttgtcttcatcgcattcaaaaagatggagtaacccgtcaatgaaaaagaagttaaatgatttccggccgttgatgacataatctttggaatactttttatctatccccaggttatttgcctggaataatttcattttctttcctcctaaactgatagcgcaaatatatgtatttttatttttatcatcataggctacctgaatgatgtcgaaatatcttgagaattgaccacttgaaatatctttatccagtttccctttctggctgatttctttgatgaggaattcaccattttcatcttccataagaatataatttttattatcaactttatatgtaacagtctgtggataaagacgattaagtgtaccgtagtcagtcatgacgtcatctctgcgtggctctgcaataggcatattggtatcctttaattatttagtggggttgatggtgcgtttatagttataaggaaatagcataatgtccgcaatattgaaagttaatgatcttattatttaaattattgcatctaatataaaatatacgatgtgattatatggatattaatgttttatatttcaggttacatatttactgtgtattttattatgataacgttaagttattattactgtaaatgacaataacgttacgtacatagcaattattactaattatcgcacagaaagctcgtaatcagaggggattagccgttagaattcatcaccatttaattaaacaaaaccggcttatattatgttacgcccgatacttcatactctgattattaccggctcactgagcctgagcgctttttcttatgctgacggcccgactctgtcgttaagtgtcagccagtccggcggctctgcacaaaatgacgatggctctcctgatgccacccgtccttctgaatccaaatcccgtattctgcctatctggggcgatgaagcccgcgcccgtggttatgatcttcccgagccgtttggtgtcggttataactatatgaatctgcggcaggatattgttgtggataaaatcggttttattatgccgacaaaaattgtcgtcggtgaaggcctttttaaagcatcggttgaaggtattaacattgatgccggtcatacccgtgaaaaaacagaaacccatatgctgaagttagactcatgggtatttccgtttatgaatgtgtatggtttatacggaaaaacaaagggtaaatctgacacaacactggccggtggttcggtggatgttaagatgtttggaaaaatacataatattaatcttgactctaagattgaaggtcagccctttaaactggatttcgaagggaaaacttatggtgcgggtgtgacttttgccggtgcctatgagcaattcttcggtacagtcgatgttaactataccaaaaccaatcttgatatccttgacggtgatattaaagcattggttgtttcaccccgcgtcggttatgaatttgttttttcaccgttaattgccggtcagggaaataccaaattacaggtctggaccggtgctatgtatcaggatattacccagcgtttcaaaggggatatcagcggattaaacttatcgttaccgggaggcatggaaaatatgatccccggcgatatgaaattcgatgttgaacagcatcttgctcataaatggagcaacctggtcggcgcccggttagaagtgacccgcaattttaatataatctcagaagtgggttttaataaccgtaacagtttctttatttccggagaattccgtttttaatgatatttcgttatttttccgctgggctggcatttgccggtctggtggcggttcacacagcaaaggccggttatttaccctcacgggaacaaattgatgatgcactgtccggactgggcagtaataaccaatttgaccgcagcaaaaccatcgactggggggggttacccgggccgttttatacccctgaactggaattaggcgtcggggtggcgctggtcggtatgtatcaggcggatagtgatcctgacagtaaaatatccaccttatccctcagtggttttgcctcctcaaccggggcgttcgggctgaacctgaataattacacctatctggataatgataactggcgtttttatctcagcggcacgatcaataatgtgccgacggattactgggggaaaggctatcaggccgggcgtgtcaaagatcatttcggtgaatataagtcacagcaactgcggctgacgccgtcactgctgcgccgagtggcggataatacctatatcgggttaggctgggatttcagcacactgaatgcggcctcgccggataaaccgttcagccgctatatggatgagcatgattatgaccggcatgcagtcagttccggggtcagcgccaccttcagttatgacagccgggatttcctgccgaatgcccgtcaggggcaggcgctggatctgcgttatacctggtatgcgccgtcactcggcagtgatacgcggtttaataccaccgagattcagtacaactattattatccgctggatgataaaacggtgctggcgtttgataactacgcgcggtttgcctccggagatgtgccgtgggatcagtattcccgcctcggtaatgggcggcagatgcgcggctattatgacggccgctatcaggataatcatgtctttgcctcacaggtggagtaccggcgcaagctggactggcggcacggtattgtgctctgggccggcggcgggacgatgagtgagagtgcacgtcatctcggcggcggtcactggctgccgaacgtcggtgtgggatatcgttttgaattcaaaccccggatgaatgtgcggcttgattttggggtcgggaaacagagcagcggtttttatttccaggtcggggaagccttctgatgcgggtatttatcagcgcaattatcatgatggtactgttatccggctgtcagagccggatggccgatgtgccggttatacgcgccgatctttctccgcagaccacggaaacggcagctcaggcatttccggttgcagataaggtgggggcgcctgacgggctgcgcccctgctgcgcattcggctatgatttgcaggcaaaactggggccggttccggtgccgttttacaccatcggcaatgtgctgaccgccggtgatttgggggagcatgtctacaatgacagcttctggtttggcgtggcggaagttatcggcctgagtaatgaaaacctcgggatcatctattcccgccacggcggatttattgatatcgcccatgtgcgggataccgccgattacacttattacctgttcacgcaaatctatccgcatcttggtaatgcccggatgctgatactgtcggatgaactgttttcccgccgtattcagttccgccattttatcccgccgcaggatccggcagagcgctataccctgagtgtgtatctggccgcgcggctcgcgtttcgcctggcggcatggcatgaaattgcccagtggtatggttatcattcagttcccggttttccggaagaaatttcggcatttaccccggaagatctctattccaatctgctgggggcgcgccttgccatcaccttgctgttacagggacacggcggatcagtcgctgattttaaccgcggaatggagagtattcttccgctggcgctggcacaactggatgcacagcccgcagccgttacccggcagatgtttgacagtatcgacgggcgctggtgggataagcgccagcgggtgccggagaagtttctggtgctgcgccgggattacagtgtgagtgatgaccggctgccgtcacagccagcgcgggaaaccgccgccggattgagactggcattacctcagcattaccggggctggccgctggcggatttggcgtcctttgaattatggcggacaaacaatcccggaaatctgccggtgaccgcactgccgtttaccgaagcggattttccggcactgacagcacatgcggcggctgaggataaaaaaacagcgccggtgtcagtgcagcgaaatcagtaacagcgggagaacccggccgggcagggattccgacggcgtttccccgatgcggatagccccctggcggatataaaatgcttccgcgttgggatcagcatccaccagaagggcgctgatacactgtgtccgggcggaggaaactgcccactggtacagtgcgctgcctattccctgatgcagataatccggatgcacaaagagtttggatagctttccgttctcttcctggcggttgatggtcagttgcacaacaccggcaattttgccgttgattcgtgcggttatcagccgcgaacggtcaaaatcagcggaggtaatggtcagttcatcccggcaggtcgccataaatttttcatcatatccccagtgttgttttgaacgcaggcacaggcgggtcagataatccgcttcatcacgctgaggcggggcgagtaaaaaaacgggtgcttctgtggtcataacgatcaaatccgtgattttgctgagacaaataataatagcagatcaaatgtcaggctgcgtaagccggcggtgtgttatttcaccgcagacggatgtcattttgtaccggtgatataagcggcgatgaccagctctgccgtggtcagcggattatggccgttatcaataatcagtacccgctgtgccgcgtattaatgtgagtcgctgagggcatgttctgcagcggtatcaatggcgcaggtggccgccagccattgcagacgcatctgacagaatgagtgcgtggccggacacccgctgcggaacagcgctgcgggaatgaccggcgcgggctctgcgttatccagcagagcataggacggattatagcggcagtgataacggtcagtcggatccatcgctttcagatagcgggtttccgccgacggggtcagcggcgcacagggcgacggattatccgcggactgctcaatcgcgccggtgtccgcagataccggctgcacaatctccttttgcatcatccccccgtgttatcactgataaaaactgcggggtcagtatataagtattctttatgcgataattcttaattcggcaaagaataccctcaggaagatgatgccggtcaatctgttaccagtatccgaggagtttccaccacaggctgccggcgataatccagataaccaggttaacgatgctcatcaccagaccggttttccaccactcacctagggtggtgtaacccgaaccgaaaataatcggggcggtgccggtgccgtaatgagtcagtgacatcatcagcgaggaggaaaacgccagggtcagcccgagcagcatcggtggtgcgccgagtgccagtccggctgcataaaatgccgcgaacatggcggtgatatgcgctgtggtgctggcaaaaaagtagtgggaatagacatagaacagcaccagcagcagcatcccgccggtccagccgatcccgagatgatcaataccgccgccgactgtcagggaaacccactttatcagcccgagtttgccgaggaatgatgccatcatcaccagcgcggcgaaccagaccacggtatcccacgcccctttgtttttcagcacatcatcccagctcagcacaccgctgcacaacagggcggcaaggccgataaaggcggcggtggtcgggttcacattatattcactgccgaacagccagccgggcacgccggcccacaatgccagcagaaggataaagaccccgagtgtgattttttccggcagagacaccgggccgagttcgcggatccgctcacgggcaaattccggggcatccggggtggcggtgatctccggtttatacagaaaatagatcaccagcggcatggtaatcagcgagatcagcgccggtaaaaatgcggccacagcccacatcgaccagctcagctctgctcctttaccggcctcctgtacaatcagagtgacaatcagcgggttaggtgcggtggcggtgataaacatggcggacgtgatagggttggtattgtaattcaccaacgccagataacggccgattttcccgctggtgccgtcatcggcttttgaaccgaaactgtcagcgatagagcgcataatcgggtggatgatcccgccgccgcgcgcagtattactgggagtgaccggtgccagcacggtttcggcgatcgccagggaataagcgatacccagtgttttcttgccgaacagggaaataaaatagtacccgatacgtgccccgagcccggttttattcaggctgagggaaaccataatagagactccgataagccagataagctcattggaaaagccgctcagggcatcagcgagcgcagctttcgcggagccgggattggtcacgccggtcagggcgacaagggcaatcgccaccatggaaacggcaccgataggcatcgctttaccgataatcgcggcaattgtgccgacaaacagtgcgagcagatgccaggcattaggatcaacaccatcgggtaccggaacagcaaaccagataatacaggtaataagaacagcgattaaggaaggaacaggtttcagcggagtcagtttattcataggtccgtccgtggtaattgtatttaactgccggagggtgacgtatttatactgagttaatgaaggttatagtatattacaacaggttaataaccgtgctgagatttactgaccgtaatcaatattatgtcagataccggttatttttctgtaacagaaaataaccggcatgaacagggagaaatgcggggaattaaagtaccggaatataataatccacgcacagatgctcaggcggattatccgttatcgcttcagtacgggtatatttttcgatatccagtcccggacggcggcataatccgagttgcggtaacgcgtataaatacacattgaaggtgaaatcccggtaatcacggaataagccgtcaaaatggaattttgcatatttcccgcggttgatcaccgctggtgttaattcgttttcctgcacaataaaggccggatcatccacaccgatatgatagccgatagcaatacattccggttgatctgatgttctgtcataggcggtgcggacataacagtgcggaagttccggtgacaccagacggataaaatcacgccagaatgtcgtgcggatctcttcatgcagatggccgatttcatccagcggtgactggtagtgatagcctttttccataacagcgatatcatccagtataataatgtccggttgcggcagcggcggcatttccagttgtaccggcggttgcagcgtcgtcagatcccagttgggattacggcggtattctgtcggggtcatattaaagaccgccttaaaacgccgggcaaaagattgctgggaatcaaactgatacttcagcgcgatatcaccgatgttttgtgtggtcagccgtaattcggtggcggcttttgtcagacggcggcggcggatatagcctgccagcgtcatatcggtaaagcgtttaaaaatccgctgaaaataccatttggtatagccggaacgttcagccaccacatccagctgcagtgacttatccaggttatgctcaatccacaaaataatgtcttttatcacactgagataaaaggcattgtcatcctgttctttatcggtgaccggtacggaatcaacggattccgtgacagtgttatcatgtttaagcataaggatttccgtttgttggcacccaaaaaatactgtgatacgattacatactgatagtatgtaacagggcatttttaccatgaacacactgaccaggcaacaggaaaattcagcacggacgcggcaggcattactgatttcggcacacggactttttattgaaaaaggctatcagtccgtttcgattgatgaaattgcccgtgatgcacgggtcacaaaaggggcgttttatcaccactttaaaagtaaaagtgacctgttattgcactgctatgaaatacaattacagaaaatcagtgctgtcctcgataatattgaacctctggcggataaatgggaagagctgcggcttgttgtccgcagtttcatgaattatctggaacagcattaccgggaactgattccggttcaggaagtgatgccggtcgccgggtggtatgaatttgaggatattaaccggcgctatatcagcagccgggtggataatattatcagtcagctgaaagcagagcagacaattaaagagtatgactcttatctgttatgcagcctgatccacggttttatgatgcatattaccctgaatatcaaaagtctcgcggaattccccggttttaaagatgatttcaccgaaatttataataacttcctgcagacactgaaaaaaacatcctgacggaatacgtccgctgacataatgtcagcgggcggataaaaaccgggtaatggcaggaaccagttccgggtgcagcgccagcgccgggttattgtaactgccgatggctgccgcacaatcagcaggggtcgctttcagaacgtgattcatggttgctatctccgcatactgattatccggtgcggtacggataagccgttcgccgttttccggagggatttgacagtcatggccaccctgaataatcagccccggaacggtcacttttgccagttcttctgccgggtcatactgcatccactccataaaatagcgctgtaattccggggcgaacagaatattgagagacggcggcacgttttccgtggttttctctgctttcagccggtcaatcacatcgttgatataggccagcgcctccggcgggaatggctgagcacgcatttgttttttcaggataatatcgatggtatatcccgcaggcgaaaccaggataatccccgccggtttatgttgttgcgccatcagggtggcaaataacgcgccttcactgtgaccgagcagatacactggggtatccggatagtgcttttgcagaaaaccgaaccacgcctgataatcccgcagataaccggcaaaggtgatatctgccgggttaacggttgctgcaccggcacctgtgccggctttgtcggtccgcagtgtgatataaccggcatcactcagggcatcgcccagcatccgcagattaccggtctgactgcccgggctgttaccgtcacgatccaccgggccggaaccgtcaataaacaggatgacacctttcggcgtgctgttttccggcagtgtcagtgtgccgttaaggccgtttatttcagcggggatatttttcccggcagcagctgtctgcaatgaaataaaaataatcagcagggcggtaaaacaatggcgtaaaacagcagtcacggtaatatcctgattaagttaaggcgtgcttttaaatgtcatatgaataattttcagtccgaccagaccgagaataataccggcggttttatcaatccagaaggcacagcgattaaattgctgacgtactgcaggccgggtcagaagatacataatcaggctgtcccagattaatacggccatcaccatccagagtgcaataccggttttaaatagtgcggaattatcctgactttccagcacaacagtaaacagacttaaatagaataataaattcttgggatttaacaggccggaggataagccgaccagaaattcttttttaaatgtactctgcggatgtgtatttctgtcttcggctgcctgtgccatcagaaaacggtaatcagatttttttgcccgtaatgcctgccatgcgataaagagcaggaatattccgccgaacaatttaatcagaatcatcagcgtgacagattgtgcgaggatagcgcctgcaccggccaggcagagtacaatatacagtgcattggcagtggcaataccggagacaacaccaaatgccacccgtctgctgttacgcagggtgctttttataatcagcagaaaatcaggcccggggcttatcagagcgataaagtgagcgagcgccacagcaaaaaaaatcatcatgatgattatccggcacagaaatgaagtaataaaaaaaacatatcactgaaccgggaattgtcatacagaaatattatcagggtgcacataatgtgcgataacatcaccggatgacaaatagttaaatattaataacgaattaaaataatctgcttttttactgctgcgcgggtggtgacagtaataatgcagattggcgataacataaaagaaactgcggaaaaaacacaataacgcctgatgatataaatcatcatcctgttattttccggctttacctgattattgtgtttttagccgccggaaattggcggtaatttatcctatgccgggtaaataaggattgataatatcgggactgtgttcagaacaatatgatgagaccgattatgaaaaccgcaataaaactaagtgtattaggttctgccgtattattaatggccgcctgtgacagtctggatccggacagtacgaaaaatgaattctggtacagcaacccgactgacaccacactgacctttaaagtggatgacaaagaatacaccaccgaaccgggtaccgccgcgaaactgaaattatcaccgggtatgcacagcattgagaatgcgaagggtgagaaacagaattttatggtgtatgacaataacagcggcggtattattaacccggataatcacgtctattatatgttgtctgaggtctatgcggtggaagggcagagcgatcgctttaaaccggctctgtatgatgtcaccattaacggtcacgatttacagatgccggtgcgcagcagcaatgccaccctgattgaccacaatctgtttaattgcagttaccctgtcggtacggccttcccggaagaaattaccaccagtaaccgccagtctgtcggtaatattaaaaccaaatgttttgataaagcggaactggtcgcctatatcgaatcggattacggcgaaaaattacagccggttgcgccgggtgaagagctgaaagataccgtcaatatgaccttcgattacaccattccggagccgcagtttaaagatgcggaaacacagaaacaggcgctgaaattaaccggcctgctgaagcagattaacgaatctgataatccggatattcacgacaagctgaataaagagatccaccagaccaccatggatctggtatccgcgtctgccgggtccgcatcatccaatacggtggcggaaaatgaatattacaacacctttatcacgcagaccggcaatttccgcgccttcggggttctgccgaaataagtgatttttcattcagttcctgaaagggccgcattattacgcggcccttttttattaaaaattttaatgaaaaataatgagttgctggttttatcagcaacaaaaaattaaacaataaagagagggacatcaaataaaaaaggagtatgatttcaggagagccgtatttttcatctgaaaacaggccgttggtataaaaaaacaacatcggtgttaatctgatgtaaataatagtttaaaacacactttattacgtaacatctgttacggaatcctttatctgcaacaaagtaatggcggaataatgtacggtccgcccggtaaaatagcacatcactatgttaatagcggtgtattttattgtttattttgttaaaggcagatgtcagttttgttctgaactccctcactttctgctcatgattttttctgcggccgtcaggctcagaagaaattaatcagattttttaaagtctccgggggattaagtacatcagcattatggagatagtatgaagtcaagaagtttaacgacctggattgtggctgcgttatttatcggggtgattgtcggctttgcgctgaacaaactggccacacccgggtttaatcagcaatattctgctgatatctcagtggtgacagatattttcctgcgactcattaaaatgattatcgcgccgctgatcctctccacgctggtggtgggtattgcaaaaatgggggatgcgcggacacttggccgggttttctccaagacgttgtttttatttgtctgcgcttcttttatttccatcacactcgggctggtgattgttaacctgcttaaaccgggtgcgggaattaactttgtggcaccggcggatacggtggtggacaatgtggcgaccgccgcgttttcggtgaaaaactttatcgcccatctgatcccgaccagtatcgttgatgccatggcccgtaatgagattttacagattgttgttttctctatttttatggggattgcgctttccgctatcggtgagaaaggaaaaccgattctgacactgctggagtccgtggtcagcctgatgctgaaactgaccggctatgtcatgctgttcgccccgctgacggtttttgccgccatttccggtatgatcgccgagcgcgggctggtggtgctgctggaagccggtatttttatgggtgaattctacctgacactggcaacattatggctggtgttaatcggtctggcagttctgatcgtggggcgctgtattctgcggctgaccaaagggatcgctgagccggcgctgctggcatttaccacctccagctctgaagcggcgtttccgggcacactgaagcagctcgagcagttcggtgtctccaataaaatcgccagctttgtactgccgattggctactcctttaacctcgtcggctctatggcgtactgctcttttgcggttatctttatcgcccaggcctgtaatattgagatttccatgggagatcagattacaatgttgctgatcctgatgctgacatccaaaggtatggcgggtgtgccgcgtgcctcgctggtggtgattgccgccacactgacacagtttaatatcccggaagccgggttaattctgctgatgggagtcgatccgttcctggatatgggccgctccgcgaccaacgtgatgagtaatgcgatgggcgcggcgattgtcgggcgctgggaaggcgagcattacggggaaggctgtcacggaaaaccgccggtagcggttgttgagatggcagaaccggagccgctgaaaaaagcaggctgaagaacctattctctgtatgaaaaaaaacacaggtaccgattttcacctgtgtttttttatatctgcagtttgtatctcatgacccgcttaacacttttacattttcattattctgtatttccgtattaagatctcatttttattaaaataaactttggttttttattttataaatttaattcaatcatcaaatgtaacgataatatgttattttctcattttgaaatcgttaatttatggtttattactttgtttttaaacggatttaataatgatattaaaatggtgtgatacgtgtctgttccttcatgaaattcaccaacttcttcattttaatcatttgttttcgtgcataataagccaccataatcgggacaggtaattttattttttaaattgtgagtcaataggttcttcatttttctgatttaatacgagtgaatataatgacaaataaaacttttgagtatcaggagccattcccgttatcggaagataaaacggactattatctgctgagcagggagcacgtttccacggcgacatttgaaggccgtgagatgcttaaggttgaacctgaagcgctgacgctgattgcccagcaggccgtgcatgatgcctcctatttcctccgtccggcacatcagaaacaggttgcacagattttaagcgaccctgaagccagcgaaaacgacaaatatgtcgcgctgcaactgctgcgcaatgcggaaatctctgccaaaggggttctgccgaactgtcaggataccggcaccgcgactatcgtggcgaaaaaaggccagcaggtatggaccggcgtcaacgatgcggaatgcttatcccgtggtatttacaacacattccagcgtgaaaacctgcgttattcacagaacgcagcgctggatatgtacacggaagtgaataccggcaccaacttacctgcacagattgatatcctggccaccgaaggcgcggaatatcacttcctgtttatcaataaaggcggtggctctgccaacaaaaccgcgctgtatcaggaaaccaaggccattctggaacatgatcgcctgaaagcattcctgatcgacaaaatgaagtatctcggtaccactgcctgcccgccgtaccatattgcgttctgtatcggcggcacctcaccggaaatgaacctgaaaacggtgaaactggcgtccaccaaatattatgacaatctgccggataccggtaatgagctgggacgcgccttccgcgatcgcgagctggagcaggaactgctggaagccacccgtgagttcggcttcggtgcccagtttggcggtaaatatttcgcccatgatatccgtgtgatccgtctgccgcgtcacggcggttcctgcccgattggtctggcactgtcctgttcgtctgaccgtaacatcaaaggcaagatcaccaaagacgggatctggctggagaaactggaatacaatccggcaagttacattccggaatccatgcgcaaagagaatgaaagcgacatggtcagtatcgatctgaaccggccgatggcggaaatcctcaaagagctgagcaagtatccggtctccacccgcgtctctctcagcggcccgctcatcattgcccgtgatatcgcgcatatgaaactgaaagagcgcctggacagcggacagggattaccgcagtatttcaaagatcatatggtgtactatgcgggtccggcgaaaaaaccggaagacctggtctccggctctctcggcccgaccaccggtaaccggatggatccgtatgtggacttgttccagtcgcagggcggcagtatgctgatgctggcaaaaggaaaccgcagtcaggcggtgaccgattcctgtaaagcacacggcggcttctatctgggcagtatcggcggttctgcggcgattctggctcaggaatatgtgaagagcctggatattctggaataccctgaactgggtatggaagcagtctggaaaatggaagtggaagggctcccggcctttatcctggtggatgacaaagggaataacttcttcgaacaggttcagacgaaaaaatgtgagaaatgcgtggcaggccagcctgcctgagccaacactttccctgaggagtttgcatgagcgacgaacgttatcaacaacggcaacagaaactgaaagagcatgtcgacgggcgcgttgccgcggctcagaagaccggcggagtcctgatggtcttcaccggtaacgggaaagggaaatctactgcggcctttggtaccgcgacccgcgccgccggacacggtatgaaagtgggcgtggtgcagtttatcaaaggccagtgggaatgcggcgagcgcaatgtgctggaaaaactgggggttgaattccatatcatggccaccggttttacctggaacacgcaggacaaagaaggcgataccaaagcggcacaggaagtatggcagttcggcaaagcgatgttagaggatccgtcctatgacctcgtggtgctggatgaactgacgtacatggtgcgctacggctatatcgacctggatgagattatcagttacctgaaaaatcgcccagaaaaccagagcgtgattattaccggccggggatgtcaccgcgatatcacggatctggcagacaccgtcagtgagctgcgtccggttaaacacgcgtttgacagtggtattcaggcacagaaaggtatcgactggtaattcatcccgtaaatacagtctgttatcacaatcgctccgtttatacggggcgattttttttgccggtccggcagtgctgcgctttgtttttcggaatagactgctggcagcggatgaacataaattgatacctttgcatccgtaaaaatactgagtaaacggaagcagacagaatgaaattaaagacgatctcagcccttgcggtatccgctgttgttctggccggttgccagaatatgaattatgacaccctggcacagtccggcggccagttatttcaggcggccaccttaaccgatgcggatatggtgaaactgacggacggtgcctgcaaagagatggacgcaaaaaataacattgcaccggcctccggaaaatacgcggcacgcatggacaaaatcgccaaatcattaggttccgatgtgaacggcacaaaagtgaattacaaggtctatatgaccaatgaaccgaatgcctgggcgatggcgaacggttgtgtccgtgtttacagcggtctgatggatatcatgaatgataatgaaatcgaaggtgtcctggggcatgaattaggacacgtcggcctgggtcacacccgtaaagcaatgcaggttgcctatgctgcggtggcggcaaaaaccgcggcgggttcagcgggcggtctggcgtctgaactgagtaattctcagtttgctgatatgggtatcaaactggttaatgcgcagttctcacagcgtcaggaaacggaagcggacaattattcctatgatctgctgaaaaaacgcggcatttcaacggaaggtctggccaccgggtttgaaaagcttgcgaaaatggataaagggcagaacagcatatttgattctcacccgccgaccgcagagcgcgcagagaatatccgcaaccggatcgcggcagataaacagtaagtattccggataataaaaaaggtggctgagccaccttttttatttaagacagaatcagttctttttcccgcgatttctcgtggatccagtcactgaatttccgcaggttgagtgatccttttttgtcctctttataggtgagaacaaagcggttgccggtgctcatcggcaggtcgcacgggatcaccagatcgccgttttccagatctttctggatagcaaaacgcggcagcagcgccacaccgagatttgagcggatagcggagatcagcatcgaaagcagatcaaagcgcgggccgacccgggttttcgggttgtgaatgcccgagagctggaaccagtcactccaggcatcgaggcgggtggtctgatgcagcagagtaaactcttccagcacctggctggtggtgagtttgatactgtcatcccgccacagcatgcggctgcagaccggtaccagctcttcctcaaacagatattcaaaatccggccacggattacagaaatcctcacgcatgattgccgcatcgtatttcaggctggtaaagtccgccggtgtggttaatgcgctgatacttaatgcgatttccggatgtttctcacggaagctctgcaggttcgggatcagccagtgtgtgctgaaggtcggtgttaccgccagctcaaacagctgctgtgatgactgccaggacataatatcctgggtgtctttttccagcttatccagcgtgtcatgcaccagcccgaggtaatgctttccggcatcactgaggaaaatacgtttgcggacgtgatgaaacagcgacacattcagaaattcttccagcgcggcgatctgacggaaaaccgcactctgggtcagtgataactcttcggctgcccgggtgtagctctcatactgtgcgacagcttcgaaggtgatcagtaaatccgttttcgggatcttctttcgcatggcgttttactccctaaaaatataatccattttaccgggtgggggatggcggcagagtgaaaccactcccggcctgatgccccatatgacaatacatgctgcatgcggcattaataacggacatggctaatgccgcgccgctgccttcacccagccggagatccaaatataaaaaaggtttcagaccgagctgctcaagcgcgatacccgcgcctttctcggcggaaaagtgggacgggataagatagtcccggacagcaggggccagacggcaggccgcgatggcgcaggcgtaagataaaaagccgtcgagcacgacaggaatgccgcaggctgcggcacccagaatcacaccggtcatcccggtcagatcatacccgccgactttggcgagcacatcaatggcatctgcaggatccggcttgttcagcgcgatagcctgtctgacgatcgcttctttgtgcgagacgcgatccagcggcagattggcgccgataccgacggtatcatgcggatcaagcccgcacaggacgctgatcatcgcagacgccggggtggtattggcgatccccagttccccggtgccgacaacgcggatcccggcggcaacccgctgttttaccagctctgcactggcaatcagcagatgttctgcatcggcataagacattgccgggcctttggcgatattgccgcagccgcgtgccagtttcagggaaatcatgtcatcgataggatcgcagtcaatgccgatatccaccggcagcacgctggtgccgttgctgcgggcaaccgcgcagacgccggtcagctgtttctgaatattgcgggcctggatagcggtgacttcctgcggggtgacggcgacaccttctgcaaatacgccgtgatccgcacacatcacaataatttctttcggcagattatccggatggttaattcccggcattccggcaagatgtaccgccagatcttccaggcggccgagactgcgcggcggcttggccaatccgttgatatgctgctctgccgcctgcatggccgtgtgatccagaggcgggatcgcacggatcaggtctttcagtgttgtcattgtttttatgctcacattatatttttataatcaaacaacaggcgtaaaacatgatcgcccgttaaacacagctaacgtcataaatccgtcgcggcattccgccacactgtaactgtcctgttcacaggggaactgccacatggcctctgcgggcaggccgaaccagcgggtgatgataagcccgagcacgcccttgtgggcgacaatcagccgggttgccggggtttctgatgcttcccggcgcagttcatccgccaccgcctgaaccctcgccgcaaactgcggaaacggctcgccgccggtcggtgcggcatgcagccagtcattcatccaggtttcccagtccgccgggtaacgggcggcaatctcactgtaatgctgcatttcccactcgccgaagtgcatttcattgaggcgcgggtcgcagtgatagtgatgagtttccggggcgcggatgtattccgctgtctgttttgcccgctgcaattcactgatcagtatagtatctatctgaatatcctgcagataagcggctacgctggctgcctggcggtggccgtgttccgtcagcggtaaatcagtgctgccgtagaacaaaccgtctttgttcccggcggtttccccgtggcggacaagaataaagcggctgatactcatctgcttacacccagaacagcgcgagcaggaagataatttccccgcactcttcagcggcaccgagtgtgtcccctgtttgtccgccgaggtgatggcggaaataacgccccagcccgtaaataataaaggcggtgataatcagtgcgccgagggctttcattccgcccgctaccgtgacaatcaccgcgccggtggcgagggtgatgacaaactggcgcagagtgatacggccgatataaatattgcccataccttccccctcgcgggcatagcgctggttgtacatcaccagtgacatacaggtgcggcctgcgaccggggcgcaaatcagcaatccggcagcggtggtcagggaaagggaagaggaggcgagaagctcatacgcggcagcggattttgccatcagggcaaaaatcagtgccagacagccatgcgtaccgatgcggctgtcgcgcatgatctccagcattctttcgcgtttgcgggcggagaaaataccgtcacaggtatctgccaggccatcgaggtgaaaaccgccggtgatcaggatcagtgccagcacatagcccagcgcggcgatcagcggactgtgagccgcttgcgcaatccacaccgtcagcagtgttgcaatgatcccggcaatcaatccgaccaccggaaaaaatggtacgccacgtccgtactgctgaaactccgtgccttcactccagcgctgcggcaccggaatgcgggtaataaactggagtgtcgcccacaggtatttcaggttcatttgatctgaactccgatcccggagaccaccagccagacctgttcggcctggcgggcgagtttctgattaatacgtccggcgatatcgacaaaatggcgtgccagccggttttccggtgtgatgctcatccccagttcgttggtgacgatatacaccgggcactcgctctctttgcaggcatcaataatatggtcgatttcgctgttgatgccgatctccagttgtgcgtaatcgagcgtgtccggatccgcgccgcccgaggcgtcatagagcagattggcaatcagcgtggtgatgcattccagcatcaccccttcgcccggtttgcgttcataacggatagcatgcgcaatatttttaaaaccttcccacgtacgccagtgctgcgggcgatcggccttatggcgtgccacgcgggcggccatttcatcatccgtcaccactgaggtggcgatatagagcgcactgtgacagcggttatccaccagttcttcagcaaaactgcttttaccgctgcgggcgccgccggtaattaaaatcatgctgttttctccttgtgtacacgcatcagacggcagatttcatcaatattgaggtgttcccgcatctgctgcgccagaatattaaactgctgttctttatgcagcgcataatcaaacgtgctctccggcaggggctccagccctttctttttccgcagctgattgagcagcggacgggtgaaattgttgcggtcaaaaattccgtgcagataagagcccatcacactgccgtccgggctgaccgcaccgtcagcatggttgcacggctcgcggtttttctcatgcatctgtgcaaacgggatggcatccgcgccggtttcggatacgcccatgtggatctcgtagccgctgatcggttcaccctgacaggctgaccagatccccggcagtgcgccgcacacggttccggcggtctgggtggtatttttttccggtgagaagcgggtggtgatatcgagcagccccagtcccggcagatcggataatccggattcgacatcatcataaatatgtttaccgaggatctgatagccgccgcagatcccggcaaccggtgtaccctgtgcatggcgggtgagaatggctttatccattcctttctgacgcagccacagcagatcaccgagggtgtttttgctgcccgggataatcagcagatccggttcaccgaccagcagcggatcggattcataacgcagacggacatccggctgggcggcaagggcattgaagtcggtgaagttggcaatgtgcggcagctgaaccaccacaatatccagcacttcctctgttttgccgtcatatttgccgacctgcagcgccacgccgtcctcatcttccagatccacatccagccacggcagcacgccgagcaccggaacgttggtcagatcttcgatttgtttaatgcccggcatcagcagagcgacatcaccgcggaatttattgatgatcacgccgatcacccgggcgcgttcgtcgtctgccagcagggcgagtgtgccgtaaatcgaggcgaacacaccgccgcgatcgatatccgccaccaggatcaccggcgcgtctatcatttcagccatacccatattcacaatatcgccgtcgcgcagattgatctccgccgggctgcccgcgccttccagcacaataatgtcgtgctcagaagccaggtcattgtaaacatcacggatcatggctttcaactgaggtttgtagaggtgatactccgccgcatccatattttgcgcgactttccccatcagaataacctgggatttgcggtcagaggtcggtttgagcagaaccgggttcatgcgcacatccggttctataccggcagcttccgcctgaaagatctgcgcccggcccatctctttgccgtcacgggtgatccccgagttcagtgccatattctgtgatttgaacggcgcgcagtgatagccatcctgagaaaaaatccggcagaatccggcaactaatacactttttccgacatcggaagcagtaccctggatcatcagtgaaaatgtcatgccattacctcgtgtgttccggcggcgggagttgtctgctgctgcaattgtgcaaacagcgcctgttcagttttgcacagcggcagtccggtttcgcagtggagtttgaccagccacggctgttccagcccggcggcggtgatcatctctttttgcaggaaaacggactccggcgtgccgtggccgcatacttcgccgtgcgacatcacgtaaataccatcacagacctgataaatcagatcaatgtcatggctggaaatcacaatgtgtttaccggcggcggcaatacgggccagcagatcgatcatctgctgacgtccggcaggatccagcccggccgtcggttcatcgagcagcagataatctgactgcatcaccagcgccccggcaattgccacgcgttttttctgtccgaaactcaggtgctgcaccggtttgtcgcggaaggcgagcgcatccaccagacgcagggcctcatcggtacggcgtttgatttcatcctcatccaccccgagattgcgcagggcgaaagcgatatcactgtccacatcggtatagaaaatctgcatatccggatcctgaaagacggtcaccacatgctgacgcaattccagcagggattttttgtcgtatttcagcggattaccccgccagttcacctgaccgtcctgcggtttcagaataccggacaggttcataaacagggtggattttccgcagccgttggcgccgataatcccggtgacctggtgcgcaccgaaatccatcgtcaggtttttcaggatattatcgtcctgatagcggaatgtgagaccgctgaccgataattgcggatgatgattcataggtggaaatctccctgatagagcttcacattcagtgcgacggacatttgctgatagcgcatcatcacgcgggaaaacagcatggtgaccagcatcgccagtgagcggtagccggtgcgcaggttgcggtagccgaagcgcagggattgtgcgtggtaaatggtggcggcttcttccagaaagataaagataaagcgccaggtcagcaggatctgctcgatcagcaccagcggcagacggccgcgtttcatcagtttaatcagctgctcaaacggcatattgagcataaaccagaaggtggcagcgagagccgccatgctgcgccagaaggtctgattggcagttgtcagaccggcgggatcaaggccaacccagtactgaccaatctgaatgccccacagcagagtgtccggtgtgcgggcaaatgagataataatggccaccagacccacagccagaaaactgaacgggatcagcagccatttaagatagcggagcggcgatacccgcagtaaccagcaggtaaacgccgcaatacacagcaataaagccgcctggcctgccggcggcaggctcatggccagaaccatcatcacgacccagaaggcaaacttcatccccgggtcacgctgacgccagcggctttgataactcagcgcatcaaggctttgcatttttccggccgctgcggtagtaaccgagcacgtagaaaatcactgcagtgcccagacagccctgtaatgtaaacagcagactttcgatttcaccactggccggttcgtacagagactcaaaccagggctcataatccggcgcgatagcgaggatctgctgctctgcctgatcgtctgaaccgccgtattcaccgccatgatcgataaagaacgggatgacaaaaatcgcaacagtcagaaacagtaaaatcagtgtctttttcatgcccgcacctcgttacccaccaggttacgtttcaccagctgatcataaaccagtaccgtcagcagaccttccgcaatcgcaattggtacctgagtcagacagaagatacccatgaacttcaggatcgccgcacccatccccatctgcggatccgggaaagcgacaccgagctgcaccgaggtgacaaaataggtggttaaatccgctatcaccgcgacaaggaagacgcagacatccttacgccagcccagtttggtggtgaaacgccagaccagatagccgacaatcggtccgataaccgccatcgacatgccgttggcaccgagggtggtcaggccgccgtgtgccagcagtaatgcctggaacagcagcacgatggagccgagcacagctaccacggatggcccgaacaggatcactgccagcgccaccccggtagggtgagagcagctgccggtcactgacgggatcttcagcgcggaaagcacaaagataaaggcgccgcacagtgccagcagaactttctggttggcatcttcctgaacaatcgctttaaggcggacaatccccgcgccgaggaacggcaggaaaatcagccaccaggcaatcgcccacatcggcggtaaaaagccttccatgatatgcatggcaaaggcttcctggggtgcaatcatcagcagaatagtgacggcggcaccggttaacgagaactgcgtgagtttctgttgcataacaacctcaccgaattatttccgggttttattaattaataccgttgagaaataaggcagtgtctgttcgtcgtcgatctcatccaggcgccgccagcactgttcagtttccagtgtggcatcggccatcaggatggcatgatcaaacaaatcatggcggcggagcagatcgcgtacctgttgtaaacgaccatagaccttcattaacacaatgcattcatgatgcgtgatcgcatgctccagctcttcgggagatgcggtacatgacatgacagcaaggctctggttttccattgccagcgggacaacggcccgtgaagcgatagccgcaaacgaggtcacgcccggaatcacttccagccatggctgattgccgatacgctccagcagggaaacccaggtactgaacagcatggaatcgcccagggtgataaagccgacttttttaccgtcagccacatcctcctgaatcgctttcgcgacatcatcccagactgcttctttcgcttcctgaggcgctttcatcaggaagtgataggttttcaccgtagttttaccggtgatatacggggcgacaatggtatgtgccaggctcggggcatctttcttaccggccggggcatacaggatatccagctcgctgataatccgtgcgccgcgcaccgtgataaggtcactggcaccgggaccggtgccgatagcgtaaagtctgccctgtggtttttctgtttgctgactcatgtgcggatattactccccgttatccattgtctgcgccaggtgttcgacaaacatctgacggatcatattgttctcacccatgccctgtaaccatgcggtagcctcgattccggcctgttccagctgtgttttccaggaatcttcttcatcggaggccatatcattgatggcatggtcaccggcgaccagcatcagcggcatcaggtgtactttgcggacgttttcggctttcagacctttaataatcaggtcgatttccggatagctctccaccgccccgacacgtcccgggaagccgctgttggtcatcatgtgatccaggcaggcataagcggagaaggcgtggtgagtggcaccgtgacccataaataccacacgctcgtcggctttcagttccggcatctggaagtgcagggcatcaatcagctgtgagtaatcctcaaaactgctcagcagcggcttgcccacgcgcagatagcggaagaacggacggtatttttcaacctggccgacaatcttttcgtattcgtccccgttaatcacatgcagtgactggatagccacatcctcataaccctgctcgtgcagatggcgtaatgcctcttcagggttattgatatgcaggttatcgcgctcttttaatttgcggataatcatgccggaggtgaaggcgcggaaaaaatcacggccggggaacgctgccgcaagctgcttttcacagctttcgatatttttttcacgggtttccgcgtaactggtgccgaaactaatcactaataacgcttttttcatctcataacctcagtaaatcaacagacagaaaaacgggatgtcagatactgctctaccccgcaaagatcctgcaattcagtcacatcaccggacacccgggtctgcgggcgtaccacgacaatgcagggaattcccagcgccagacagggggcgattttttcactgaatccgccctgggtgccggactctttggtgatcaccacatccgtgccgcagtaacggtaaaacgcttcattaaattccgccgaaaacggccctttgagggcaaaaatctggtcaatggtcatcccgtaagattcgcactgcgccagcacttcctgtgtcggcagtacccgcgccagcacggttttgcccggcagccgggcaatataatccgccagctgtttgctgccggtggtcagcaaaatccgctgaccgagtgtcatggcaatctcacaggcgctgtcgatggagtccgttttgtaaatcagcgggttatcaaccgcgtcaatatcactcgggcggttataacgcaccagcggaatgcccagctcacgctgcacctgcaaaatagtgtcgctgagcacggcggcgtaaggatgcgagagatccgccagcaggcggatcccgtgacggcggcagtattccgccatcgcctgtgcatccatccggccttcccggatctcaccctgtaatccggctgcctgctgacggcctgcggcggtggcgaccgagagccggtagcggactccctgtgcatccaggcgctcacagagcagacgggcatcactggtcccgccgaaaatcagcagtctgccgtcattcacagtttgtatccccgtggtgtgatcatcaggtcatcactgatataggtggatttattaccgacaatcaccaggctggtcatatcgacacgctcatattccatctcaccgaaggtggtgatccatttctcttctttcttacgggccgcagctttcaccacgccgatcggggtggtggcggctttgaacggtgccatcagttcaaaggcacgggccagatgaccttcgcggcccaggctgcgcgggttatagaaacagataacaaaatcggcttcggcggcggctttgatgcgtttctcaatcacctcccacggcgtgagcaggtcgctcaggctgatatggcagaagtcgtgcatcagcggggcacccagtaaagacgcggcggcgatactggcggtaatacccggcaccacacgcacctgaatatcgcgcttctctttggtgacgatttcgaggataagcccggccatgccgtaaatcccggcgtcaccgctgcacaccatcgccacgtttttgccttcctgtgcaagctcaatggccagatagcagcgttcgatctctttgcgcatgccggttttgatgacttctttgtcgcccaccagaggtttcaccagatgggtataggttttatacccgacgaccacttccgcttctttcagtgcggtgacggcttcttcggtcatcatggcttcactgccggggccaatgcctataacggttaacatactgtttctgctcctaacgtaatggtgatcccccgggtcttacaggtttgccctatcagacagcctttgctcatcagccaggcgaccggccgggatacactcccgacacccgtggtttttttaacaaattctgattccgggaactgtgccgccacaggggcaagctcctcagcactgaatacggtaaacggcacctgatagcgggcagcgagcgccagcagggcgggctcctgtgctttcagggtaatactgccgatagcgcggacggcttccggcagcagattgttctcagccagctgttcagcaaacagctgctgaacctcgtctgccccggtatctctgcggcagcccataccggcaataatccggcgcgggatcagtttatataccggcaccggcagcatcacttcctcgcggcggtaactgacacacaccagcgcatccagttccggcagagtgcgcagatccgccaccgggataagccccggtaaggcgtatttatcctgctctgccgccatatcaggatgccaccagatgccgatacgatccccgctgaccatcatctggttcagggttttgacggtggcgcggaaatcggtgaacgtggcattcatctcctgcgccagcagatcaaaactggtgacctgattgacatcggttgcggtggtgatcaccgcctgtccgccgatccggcccgccagccaggtggccagctcgttagccccgccgagatggccggagagcagactgatcacatgctgtcctttctcatccatcacgatcacggcagggtcactcattttgtcctgaatcaccggtgccagtacccgcacggtaatgccggttgcgccgatgacaatcagagcgtcattctctgcaaatgcctgctgtaaggtggcggcaaagccgtcacggaacggttcaaagccatccgagaccagtttttcgctggtgtaacaggtcaccggcagcagcgggcggatcttttccgccagcgctttgccgcccggtgtcaggcaaaacagcgcaatgcgcttaccgcgaggctttgcggtactcatggctgaagcctgcgtcatacagttttgaatagtgatactcgtcgccgaggaacggaccgaccagaatcagtgcggttttgcggatttttgcgtcgcgcacggcaacggtgatctccgccagagtactgcgcagcacctgacaatccggccaggtcgctttatacaccacggcgaccggggtggtttccggataaccgccttcggtcagttgctccaccacgcctttgatatcctgaacagacaggaaaatcgccattgaggtctggtgagcggcaaagctgcgcagactctctttcggcggcatcggtgtgcggccttcgatacgggtgatgatcaggctctgggacacttccggtacggtgtattccacacccagttcggctgcggcaccgaggaaggaactgacgcccgggatcgcgctgaagccgatattgtgttctgccagcacttcgccctgttcacggatagagccgtacagggataggtcgccggtctgcagacgcaccaccagtttgtggcttttcacgccgtcaaccatcacagtgatgatgtcgtcgagggtcatggcggcgctgtcgtagctttcgacgccgtctttgcagtagtccagcagatcagtattgataagcgaaccggcataaatgacgatgtcagcctgttgtaaaatacggtagcctttcagggtgataagactgatatccccgggaccggctccgacaaaccagactttctgacggtcaaactgttcagccacaacgcgcctccttacggcaggaaataagataggtaggattattcggtttaaaataataactgtgtccgagcgcggtcatatttccggcctgtaattcacagcagtccagttcgctcaccgcacactgtttcaggtgcgcaatggcttgtgtcaggttatccagcaggataaaggtcatcaccagggtgccgtcgctgtgcagatgatcgagagaccagtcgataatctccgtgagatttcctccggtaccgccgacaaacacggcatctgctttttcggccagttccaccggtgcatacgcgtcaatcacgcggatttgcgggcagcggaaatggaggcagttctctttgataagcgcaatggcttccggttttttctcgatggcaataatctcaagcgccgggtggctgagtgccgcctcaatcgaaacactgccggtgcccgcacccacatcaatcaggcgctgtgcaccctgtaaatccagccgcgacagggcgagagcccgtaccggctctttggtcatcgggatctgttgtccgcgcagaaacagttcgtctttcatcaggccacactgccttgtttatcaattaacaccacattcatgtcgtaatccccgctgacatcgtccgcattgaggatggtgatccgttcattgcggccggagaggttttctccgatgatcatccgccgggtctggccgcgctgacggatttcagcggcaatttctttcgggccgatcttactgtccgtcaccataccgatacgctcatgggcgagcagccagtcaaaatccgggctgcggttgtggctgctggtgagataaatatcattcatatccattcccgcgcgggaacacagatattgtacggagctgatgcccggcaccatctgcacctgctccggtgcgaaggtttcactgatgcgtttgccgatgccgaaaaacatcgggtcaccggaagccagaatgacaatgcggcgatcaagacgctctgctatccagttcatcaggccgctgatatccgcatcaatgacacgggtttctgtggtcagcccggcaaattcatccagatggcgctgaccgccgattaaaatgtccgccccggaaatcacatccgctgcccgccgggtcagatacgcttctgagccggggcccacacctgtcacataaatcatcggaatccctccgttatggcgctgagcggccggttggtccccagcacctgattatcaaacgagaacagaatggcatcacagtgcggcggctcatcggagaaacgcagcatctgattaatccggtcacagattttttctgcgatccgcggatagaccgcctgccagccttgtgcgttaatcagttcaatcgccgcttcggtggtggtgcagccgtccacttcctgtaataaggagagcggggcgccgatcagggcgagattggcgatcagggtttccatccgcgcatccgcaatatggctgtgggtgtggaaaatgcctgccgcgattttgaccagcttgccgaagtgcccgaggatcaccacctgctcaaacttcagtcgtgtggcttcctgcagcatatagccgacaaagttactcatagtgacgacataggtgccgtccagcccgagctgttcgctgacaaaccgttcgccgtggttacccggcaccaggaaaacgcgggtcataccctgggtgcgtttcatttccagctcgatggagagggagcgtttccagctctcttccgacatcggcgtgacaataccgctggtgccgatgacagaaattccgccgagaataccgaggcgaccgttataggtttttttcgcccgctcttccccttccggggcaaatatggtgatatccgccccccggttcgggccgatgacttcgcggaccgccgcttcaatagtctgacgcggcgttttgttgatcgccgcgtcaccgataggcagaccaacaccggccttcgtcacccggccgacaccttcgccgccgtccagggtgataatgccgctgtcattgactgcgacacgggcaaaaatcagcatgccgtgggtggcatcaatatcatccccgccatctttacggatggcggcggtggcggattgcccgcaaatcagcggatcttccacattcaggttcagtgtcacaccggacggcgtgacaatcgacacctgctgaatcacttcctgacgcaacaccatcagcgccgccactttggcggcagcggtggcacaggagccggtggtataccccttgcgcagtgccttgcctttgtgccagacgacgccggtgccgttatcgtcaggtgctgtgatgtttttctgcgtcatgattacgcctccggcatccggtaaaggatggcgttgataatcgcagcggccacgttactgccgcctttgcggccgagcgcggcgatacacggcagcgaactctccgccagcgcatctttggattccgccgcgccgacaaaaccgaccggtacaccgacaacggcaaccggtttttctgcgtgttccagcacgcggaacagggcggtcggggcattaccgaagacaaaaattttctcacccggctcctgcatggcgatatccacggcggccatagagcgggtcatctgctgctctttggcggcagcgaccacacgcgggtcgctgacatagcagcggcactctgagccgtatttcgccaggcgggttttgttgatcccggacagcgccatagtggtatcggtataaatagtgcagccgcgcataatgccgtcacggaggatttcaatcacaccatcagaaaaatgcaggatatccagccagtcaaaatcggcagtggtatggatagcgcgtttgataattgccgcgtgatcatcactggcgaaacggtattccggccgtgtttcgcggataatgtcatcaatgatcagaaaactgtttttttcgatttcctgcggctgttgtatgtaactcatatttttcccttacaaaatccactgtgccagaagatgaatgacggcgaacagcgccagtgcggcggaggaggcaacccacatcagccggatggtgctgagaatatcgtctgcattgatgtcgcgggtgttgtcgccgatccacggcttatccaccagctgaccgaaataggtattcggcccgcccagctgtacaccgagtgcgccggcgacagtcgcttcggaccagccgctgttcgggctgcggtgattggcgtgatcacgtaatccggtgcggaaagcctcgcggtaacggtatttcagaacaaaggcggcgaaggtgaacagcagccagctcagacgcgccgggatatagttggcgacatcatccgcacgggcggaaaacataccgatatcgccgtacttttcatttttatagccgaccatcgagtccagggtattcaccgctttataggccatcgccagcggtgcgccgcccagtaataagaagaacagcggggcgattacgccgtcggtggtattttccgcgacggtttcggttaccgcgcgggtgatttgcggcggtgtcagctcccgggtatcacgcccgacgatccatgataatttttcacggctctccgccagatcatccgccttcagcgcgtcatacacccgcatcgccgcatcctgtaaacagcgggtggcaaggacggtgtaggtcatccagatggtgacgagccagccgagactggtttccagataaaacgccagcgccagcacgccgtaactcaccgcccaggtgccgccgacgatcacaatccacaacacggctccgccacggcgcagtgccgcaccgctctgacagcggcggcggatcacaccttcggttttacggatggcgttgccaatccagcggatcgggtgcggccagtgctccgggtcaccgaggcgccagtcgagcaggaaagcggccagccaactgagcaacgtcataacacactccgtgccagggcaaaccagtgatccaataaccccggacgctgggcaaaatgcacatgcagatatccggcaaaggtatttccgacctgataaccgccgcgccagcgtttgaggatttcgccgtcgcgctctttgataaactcaaaagcagacggcagatcagtctcaaaatcagaataatgaaactcgtggccgcgcaggcgttcaccggcacgaaccagagtggtgtctgtcagtgcggtaccttcacagtaaccaaagcgcttcagtcggttacccatggtgctgtgcccggcaatgatgccggtcatcgggaaggtgttgccggtgctgtctgtcagggtttcaccgagatacatcagcccgccgcactccgcataaacaggaataccgcgctgatgcgctgccagcagtgcgtcccgcatcacggtgttagatgaaagtttttcagcatagacttccggataaccgccgcctatgtaaatcatatggcacggatccggcaggacgctgtcattgagcgggctgaatgtgacaatctccgcgccgctctgacgcagtaaatcgagattatcaggataatagaagttaaaagcggcatcatccgccacagcgacagtcagcccgcgtccggtacccggtgtggccagcggcagcggtgtgccgtctgccggtgcctgccagcgtgtcagggaaagcagcttatccacatcaacggttttttctatctgatcagccagacgctgccagcgctcagtctgctgtgcctgctcctgcggcgggatcagccccagatgacgggaaggaagttcaatatcgttcatcaccggcacgtagccgatcaccggcacatggcagtaatgttcaatggcgtgtttcaggagctgaaaatggctgtcactgttaacgtggttaatcagtaccccggcgatattcagtgacggatcaaaatgctgaaatcccatcaccgtggcggcaattgaggtggaaaccgctttgccgtcgaccagcataatcaccgggcagttcagctgttttgccatcgcggcggtgctgcaatagtgaggatcggtaccgaagccgtcatacaggcccatcacaccctcaatcacaccggcgtctttgtcctgcatataatgacggaattgcggggtcagaacggactccggcagcataaaggcatccaggttacgggaaggtacgccggtgacggcggtatgccagctgctgtcgaggtaatcagggccgactttgcagggctggacacgcaatccgcgtgcactgagtgcccgcatgatcccgagggtgatggtggtttttccgcagccgctgctggtgcccgcgattacgaagacctgtttttgtgccttattcatacgctacctttgacacggtgttgttgccaaaaaaacgtcctgataccaggaaagcaaaaaaaggttaaataaattaacccggtgaactgtctttttattttcatgatcataagcaacacggaatattgctgaacagcgacacgaaaatgtaatgatcatttaattaacattgccgatttttgatatagtgatttttttacggctatttatattcgggtttaataaaacataaaatgctgcttttatatatctgcttattacagtttgtgagtttcttcacataaatacttgatttgtgatcaagatgaataaaatgcaactattttatttttataaacatatgcaaatatgttaattaaatgatcttgtttttattatttgttaatgataatttcagaaatggcggctgatttgttgattataataacctgtttttatgaggtgaatgtaaaaacccatttatttcagttgcttgaaagttcatgatctacttgattttttttcatgaactcttccgttacgtgaacgtattattgggatattagtcatatattttttcctgtgattatttaataatacaaaatattaaacagaattgtctttattacgcatttatcgtgaatagatcaaagaataaagttcacgggtaattaatactgctgtccaactacaaaacatcattaataaatagtattttttatcaccaccaggtgtcgtgcataacgaataaaatgatgtgattttttcatgttgattaatctgattgataaggcaataaaatgagcaaaggtaaagtatggctggtcggagccggacccggagatgcatcattaattaccgtaaagggacttcactgtatacgtcatgccgaagtgctggtgcatgaccgtcttgtcaatcctgagctgatcgcctgtgcaccggcggactgcaaaatcatcaatgtcggtaaaacaccgaatcaccatccggtgccgcaggaagaaatcaatgccatcctggtgaaatatgccgcagaaggcaaaaatgttgtgcgcctgaaaggcggggatccgtatgtgttcggccgcggcggcgaagaagcggaatctctggccgaaaacggcctcgattttgaggttatcccgggcatcagttcctctatcggcgggctggcgtatgcggggatcccggtgactcaccgcgatcacgcatcaagcttccatgtggtcaccggccatatgtgtcaggggaatgagccgcagaactggaatgcactcgctgcccttaacggcacactggtgattctgatggggatgacccgcctggccgaaatcagtcagttgctgatcgacggcggaaaatcaccggataccccggctgccgtggtcatgtatgccagccagcagcgccagcaggtggttactgccaccctcgccaccttaccggaagaggctgcgcgtcataaattacatccgccggcactgattgtcgttggtaatgtggtgaatctgcaccaaattctggcatttgcggccacacaaattgatattacgcaggaagccccattagaagctgcgtcatagtattatccttaaaataataagcatccggctgtatgcaggtgattctgtgtgcagcccttacatttggaggaggctatgagcgaacacggtggtaatgtggtagaggtggctgagctcctcggcatctcacccgcatctatcttcgatttcagtgccaatattaacccgctggggccgcccgagagggttaaagccatcatccgcgataacctgtcagttattgaacgctacccggatattgaataccgctatctgcatgccgcactggccaaaggtgcgggttgtgaactggggcaggtcattgccggtaacggagagacggaactgatttacgcgctggtgcgccatctcaacccccacagcgcattactgttaacccccggatttgccgaataccgcagagcactggaacagcagggctgcgatatcatcgaacacccgctgacggaagagaatgatttccagccggatgaatccctgctggcggatattgaagcccgccgcccggactgtgtgtttatcgccacaccgaataacccgaccggtctgatgccggataccgcactgctgcacaaactggtgtccctgtgcgaatcccgccatattcatctgattgtcgatgaagcgtttattgattttctgccggaaggatcaccgctgacagcgcgcctgccggaaacccgctacctttatctgctgcgttcgctgacaaaattcttcgccattcccggtctgcgcctcggttatctgctgtgcggcgacagccacattatcagtaatctgaaagcctggcgtgagccgtggactatcaatggtctggctgcgctggtgggtgaagcactgctggatgatgaagactatatccgcaaaacacaggattttattgccgcccagcgggaatacctgtgcaatgaactgcggcagtttccgctgctgaaaatccggcagccatcggcaaactatatctttatccgctgcctgaacggcgtggaactccagtccgctctgctgaaatataagctgctgatccgccgctgtcagaactacccggggctggatggctcttattaccggatcgcggtccgcagtcaggcggagaaccgtcatcttatcggcgcattaaaacaggtatttcaacatggctgaggcacattgtccggcatcctgcggagaattgttgcagggatggatcctcgggggagaaaaactggtttcctgccccatcaactggtacagctatgtctcggtggaagaaggtgttccgctggggctggaacggccccgcatgcgccagatgctggaacgcgtactgaaacatctggatatcgtgccggaagccaccggtatgctgcggatcgaatatgaatccaccatccccgtcggtaaagggctggctagcagcacagcggatattgccgccaccgcccaggcgaccgcacgtttttacggccatgaattatcaccggaaactctcgcagaactctgtgtggcggttgaaccgacagacagcacgctcttttcctccctgacactgtttgaccaccagacggctgagacacaaatatcactcggctgggcgccggatctgaaactgctgctgctggaaagtccggatgtggtactgacggaagatttccacaagcgcgaccgccgggccgcattgctggcgcgggaacctctgctggctcaggcctggaaactgcttaccgccgcctgtgaacaacaggatccgcagcgactgggcgaagcagccactctgagtgcgatcgccagccaggatctgctgcccaaacccggtttcagcgagctgcatgcccttgcagataaaggaaagatttacggtctgaatgtcgcccacagcggcagcgtggccgggcttatctatgatgacaccctgcacgataaagattttatttatgactggatccagcggcatcagctggacagattctaccctcaggtgcatgaggtgagcatggcgccgggcggcgtccgctaaatactcatcatccttcagcctgtggctgtgttggcttcattcagctgaccgggtcacatactggtgtatgctccccggtcatcttcactttgccgccttgccacagaccgaatgattttgagtattcctatccgcgtcattcttcaatccgcagctgcgttggctgcactcaataaaccgggtcacatactgatgtatgctccccggtttctttcgtttgccgccttgctgcaaattgaataatttagcggatgactcctgagtctctttttatttaacgtcctgacttctgtgggatgatattgaatatccacggttttcatcatgccaaagtaaaaggcagataaccggcagagagacgaaaagcatgcgcgtcatggatgacgcgcctgagcgcacagggaggtgtttacagcggcttttcgttttgccggttatcagctcggccccggtgctgagcgtttcacccccctttgttaacaacaggccaccgaaccaaagttcgcatcattccatccgcagcaaaagtaaaaggcagataaccggcagagagacgaaaagcatgcgcgtcatggatgacgcgcctgagcgcacagggaagtgtttacagcgacttttcgttttgccggttatcagcccggtcccggtgctgagcattccgccttctttattaacaacagactcaggtgctgagcattccccctctatttaacgcgctgccccacaaagtacgcgccgctttgctgcgtcccggtaacgggcaggatatgattcagacaactgattctgacgctgtccgcaaaggagacactatgctgcgttatccgctgttttgtgatttacagggaaagacctgtctggtcgtggggggcggggaagttgccgcccataaatgccggacactgttacaggccggggcgcatgtcaccgtcattgcccgctggttccacggagatctcaccgctctggcgggaaatccgcatcttacgctgacagaagcggactttgatgctgcactgtggccgcagggctgttggctggcctttgccgcgacagactcaccggaggtaaatcagcaggtgctggaacaggccaatgcccgtcactgcttctgtaacgtgactgacgcgccggaaagcgcctcatttatctccccggccaccattgatgtcccgccggttcagattgcgctgacctgcggcggaaacccggtctatacacagtttctgaaacaccgtgttatgcaggcgattccggcggatgccccggtgaagctgcgtgccgccgcacggctgcgcgagcaggttaaagccaccaatgcttcccgcgatgccaaacggctgttctggcagaagttctttaccgacaccgccctggaacaactcctgccgctggaagatgaggaactgctgactgactaccttaattacctgctggctcagtttaccgaagagcacggaatccgctgaaaaaataaaaccccggcaccgtaatagcggttccggggtaattatgtgagctgaatggcttatttcagtcattggaataacaaaaacaagacagcatcattatcatattaataataagtcatttacttttttgtatcatttatttttttatttctctgtggcattccgttgcatactttaataagatgttcgtcacactatttcgtcattttttatcaaaatatattcatgttgaatatactataaaatatagtttaaacattaaaaattaattgctatttatggtgaatttaataatataacaatgatcacaaaatcaggattgatttatttgtcattaggtttaaataattgttaattaaagtttttgtttgttgtttttgatggtatctatatgattttaaatggaatttaagtgtgatctgtatcgtgttttataccccaccgaaaaccattccgtttttgcaagatatccttactttatatcaattgtttttaaatcccctgaattgcacattatcatcagtggaaagttaaggaattaaatagggatgaacacctgatttgtacttagatactttcttaattaataccaaacggatttaacagattttgttttaactttaattccgaacattcagtttatttagaggtatatcatgcagaagcctaccattgttattggtgtaattggtgccgattgccatgccgtcggtaacaaagttttagatcgcgtgttttcccagcacaattttaatgtgattaacctgggtgtcatggtcagccaggacgaatatatcgacgccgctattgaaaccggcgcgcaggcaatcgttgtttcctctatttacggtcacggcgaagtggactgtttaggtatgcgtgagcgctgcatcgaacgtggtctgggcgaaattctgctgtatgtcggcggtaacctggttatcggtaaacaggaaccggctgaaatcgagaaaaaattcagcgacatgggctttaaccgcgtgttcttcccgagcacagacctggaatacgtctgcgatgtcatgaaaaaagacattgaaaaaagcccggcccgcaaagaaggaatgaccgcgtaatgatcaacgtctcgatagatatcggttcaacctggacaaaaggtgccgtgttcgacgtgggaagtgatgatcatattgaattaaagaattatgccctgacccccacgacgattgaccatctggcagacggatttttcactgtactgaataaaatcctcaatgtgtccgatgcgcgtcctttactggaagccgggaaagttaacattaactattcctcttccgccaaaggcgggttagcggtagcggcactgggtctggttccgacaattacacttgagtcagcaaaagtcactgctcactcagcgggcgcaaaagtgtctcagcactttgcgtacaagctcaaccggactgatatccgcaaactcgaacagacacccccggatattttcctgttcaccggcgggacggatggcggcgatgtcggatacggattacaaaacgcaaaaatgctggcggaatccgatctgaactgctccatcatttatgcgggtaaccgtgatattcaggacgatattgctgagatcctcggccataaagaactgactgtcgttaacaacattttaccgagtctggatagtccgaacccgtttgatgcgcgtaaagctatctgtgacatttttctgaaaaagattgtgaagggcaagggactggacgtcattgttgaacagaccggcgaagagccgcgtccgacaccattctctgtctttgagttagtacagcaaatccgtgacaacgttcccggctgggaagagtttgtgctgatggatatgggtggcgcaacgacggatatttattcgtcctgcaacaacagcttactgccggataccattttacacgggattccggagccgaaagtgaaacggactgtggaaggtgaccttggcatgcgtgtatcggcggtgatcgccggtgaggcaggccgcgaattagccgaagcgcagtttgtgaatcatccggagcagctggatgccttttaccgctacacccgttatgtcaatgagcaccctgattatctgcctcagacggacgaagaacgtgtttatgaccatctgttagccggtatttgtgtcgcactgggaactgaacgccatgcgggcacaaaacagcaggtgaccacctgtgcaggtacggtggatttacagattggccgtgatttatcacgggtcagcaaaatcatcggtaccggcggctggttgtcgcggacagctgattttgacattaaacagtatatgcggtaccgcaaattcgataacaaaggccgtcagattctgctgccggacgaatttgagtactaccgggattcacaagggttatttcctctgttagccaacgtcgcctgccggtatccgaaagcagcagctcagaccggcgtgcagattttgaccagatagcaagattattggagccattaaatggaactgaagaataaaaaaattgcaatcgacgacttcatggccgagcgcaaagacgtattaaagacctgggtgacagggaaagacgtggaaaactttgaagatggtgtcaaatatcaggcgactatctctgaagataaaaactttgccaaaaaattattcgaagctgaccgcgacggcatcacattaagccagccgcgtgcaggtgttgccttaatcgaagagcacatcgagctgctgaaaaaactgcagaaagagtgtgacctgctgccgaccactatcgatgcgtatacccgtctgaaccgttatgaagaagcggcagtcggtatccagaaatctgttgaagccggtacctctaaactgaacggcctgccggtggttaaccacggtgttgcagcctgccgtcacatcactgaatccctggataaaccactgcagatccgtcacggaaccccggatgcacgtctgctgtgtgaaatctccatggcgagtggtttcaccagttacgaaggcggcggtatctcctataacatcccttacgcaaaacgcgtcaccctggaaaaatccatccgtgactggcagtactgcgaccgcgtaatcggtttatatgaagaaaacggtatccgtatcaaccgcgaaccattcggtccgttaaccggtacgctgatcccgccattcatttcccacactgtggcaatcatcgaaggtctggtggcgctggagcagggcgttaaatccatcaccgtcggttacggccaggtcggtaacttagtgcaggatatcgcggcaatccgctccctgcgtgaactgtctcatgaatatttccgcgcttacggctacgaagattatgagctgagtaccgtattccaccagtggatgggcggtttccctgaagatgaatcccgtgcggcggcagttatctcctggggtgcggcggttgccggtatgtccggtgcaaccaaagtaatcaccaagtctccgcatgaagcattcggtatcccgactgcggaagcgaactgccagggtctgcgtgcctccaaccagatgctgaacatggtccgcgaccagaaattcccgccgtgcaaagacgtggatctggaagtggaactgattaaacgcgaagtccgcgcagtgatgaagaaagtccttgaactgggtaacggcgacattgcagtcggtactgtccgcgcattcgaagccggtgttctggatattccgttcgctcctgcgatgtgtaactccggcaagatgatgcctatccgcgacaacaacggtgcaatccgtgtgttcgacgcaggcgcggttccgctgccggatgacgttctgtccatgcaccatgatttcgttgctgagcgtgcccgcgaagagggtcgtgaagcttcattccagatgattattgatgatattaacgcagtatctcacagtaaattagtaggaagaccataatgaaaattaaacaggcattgttcacggcgggtaactcatccttctattttgacgaccagcaggctatcaaagacggcgcaggtcacgacggtttcgtctacaccggtaagccggtcactccgggctttaccgcagtgcgtcaggcaggtgagtgtgtgtcagtccagttaatcctggaaaacggttctgtggcaatgggtgactgtgccgcggttcaatactccggtgcgggtggtcgtgacccgttattcctggcggaaaacttcattccgttcctggaaaaacacatcaaaccgctgctggaaggccgtgatgtcagtgagttccgcaacaacgctaagttcttcgatgaactgaaagtggaaggcaaacaactgcataccgctatccgttatggtctgtcccaggctctgctggacgctacagcactggcaagcaaccgtctgaaagctgaagttgtgtgcgacgagtggcatctgccggttgtggctgagccaatccctctgttcggtcagagtggtgatgaccgctacaacgctgtggacaaaatgatcctcaaacacgttgacgttctgccgcacggcctcatcaacaacgtggatgaaaaactgggccgtcagggtgaaaaactgcgcgcttatgttgagtggctggccaaacgtatcgttgaattacgtacagaagacacttacaaaccgtctctgcacatcgacgtttacggcaccatcggtttaattttcgacaaagatccgattcgttgcgcagagtacatcgcaagtctgcaggagcaggccggtgatctggaactgtacatcgaaggtccggttgacgcaggtaacaaaccagaccagatccgcctgatgaaaggcattatggatcacctgaaaaaactgggttccaaagtcaaaatcgttgctgacgaatggtgtaacacctgtcaggacatcatcgacttcacggatgccggctgctgtgacatggttcagatcaaaacccctgacctgggttctgttcacaacatcgctgacgcggtgctgtactgccagaaacacggtatggaagcataccagggcggtacctgtaacgaaaccgacgtcagtgcgcgtacctgtgtgcatatcgcgattgcgacacgtccgatgcgtatgctgatcaagccgggtatgggcttcgatgaaggtatgaacattgttcataacgaaatgaaccgcacactggctgtactgaaagcaaaagcataaggaagcattatgtccaggacatttaaaatcctgtcccctactgccatcctggggtacggatttccggaagagagttttatgaaggcgatggaagaatcgccggatcttatcgccgtcgacgccgggtcttctgacccgggtcctcactacctcggttccggtaaagcctttaccgaccgtgccggggtaaaacgcgacctgcgttatatgctgaaagccggtgtgaaaaacaatattccggttgtcatcggtactgccggtggttcaggtgcacagcctcatctggaatggtgccgtgaaatcattctggaactggcaaaggaagaaggtctgtcattcaagatggccctgatccctgcggatgttgagaagaaaaccgttcacgaagcgctggatgcaggcaaaattacgccgctggcgttcgtgcctgaactgacgcatgaagtgatcgacgaaagtacctatatcgttgctcagatgggtgtcgagccgttccaggaagcactggcagccggtgctcaggttgttctggccggccgttcttatgacccttgctgcttcgcggctctgccgattatgaaagggtttgacgaaggtctggcactgcactgcggtaagattctggagtgtgcggcaatcgcagccaccccgggttccggatctgactgtgcaatgggtattatcgacgaaaccggtttcaccctgaaagcattcaacccgatccgtaagtttacggacacctcagcagcggctcacaccctgtatgagaaatccaacccgtacgtattaccgggaccgggcggtgtgctggatctgaaagagtgtaagtttgaagatctgggtaacgggcaggttcgtgtaaccggttcacgccatgtatcaacaccgtataccgttaaactggaagctgcacgtccggtcggttaccgcaccatcactatcgccggtacgcatgaccctatcatgatcgccggtatggataagattctggtggaagtgcgtaaaagtgttgagaaaaacctcagcatcgaccctgataccgtgaaaatgaatttccatctgtacggtaaaaacggtgtgatgggggacgcagaacctgaaactgtgaccaagagttatgagctgggtattttactggatgttgttgctcctacccaggagcaggcagacagtatctgttccctggcacgttccactatgctgcactacgggtatgatggccgtatcgccaccgcgggcaacttagccttcccgttctctccgtcggatatccgtgccggtaaagtgtatgagttctccatctatcatctgatggaatacaccccggatattaaattcacattccgtatggagaatgtaacacctgaaggagtggcgaaatgaaaaagtcaattttagaattagccaaagttgtgcgttctaaaaactccggtccgtatgaaattgtgatggatattttattcaaggataaagaaacttataccgcggtaaaaaattcaaaacaatttaataaagacttagtcgctggtctgtattgtgtgaaacctgactttatcgataatattgtctggtttgacccggcgaatgctgtgaaaattgtaatgccgagacatattgtttctggtgctgtcggagataccgatgtttatggtgcccagcaacatgcgcctttattaaaaatggaatttgatatttaacaatatcagtcattcaatatctcattagtacgacaactcggtgtggcgtacggggttcccccgcgctccacatcgatttcagaaacagaaatcgtcatttttctcagtgtgatgtataaaattatttaatatttaaagccacggaaggctgggtaaaaataactgaaataaaatttcagaggatattaagtaagttgagaataaatgcgacccaacacagaatggaattattatgaaatcgaagagtttaaccacttggatagtcattggtcttattgtcggtgtgattgtcggcttcagctttaatgaaatggcatctgctgaatttaataaggtctatgcaaaagatatctccattattaccgatatcttcttacgtctgattaaaatgattatcgccccattgattatatcaacactggttgttggtatcgcgaaaatgggtgatgcgaaaacgttaggtcgtgttttctccaaaacactattcttatttatctgcgcatcctttatctcaatcctgttaggtctggttattgttaacctgttccagccgggcgcaggtattaacttcgttgcggatactgccggtgcggttcagggtattgtggaacctgttcctttctccttcaaaacctttattgctcatgcgattccgaccagtatcgttgatgcaatggcgcgtaacgaaattctgcagatcgttgtattctcaatctttatgggtatcagtctctccgctatcggtgagaaaggcctgccgattgtgaatgtgctggaatccctcgtcagcctgatgctgaaattaaccggttacgtcatgctgttcgcaccactgacagtgtttgccgctatctccggtatgattgcagagcgtggtctgggtgttctggtcagcgccggtatcttcatgggtgaattctactttacactggcgatgctgtgggtgattctgattggtctggctgcggtggttgtcggccgctgtatcttccgtctgaccaaaggtatcactgaacctgcactgctggcattcaccacatcaagttctgaagcggcattcccgggtacgctggaaaaactggaagagttcggtgtttccaacaagatcgccagtttcgtactgccaatcggttactcctttaacctcgtcggttcaatggcttactgttcattcgcggttatctttatcgctcaggcatgtaacatcaccctgtctatgggtgagcaggttaccatgctgctgattctgatgctgacatcgaaagggatggccggtgtaccgcgtgcgtctctggtggttatcgcggcgacactgaaccagttcaacattccggaagcgggtctgattctgctgatgggtgtggatccgttcctcgacatgggccgctctgccactaacgtaatgagtaacgccatcggtgccgctatcgtcggccgctgggaaggtgagcactacggtgaaggctgccgcggaaaaccaaaggcagttattgaacctccggtagcacaggccacaacgtcagcctgaccggtcgttcagaataaacaagacaggcgcggtacaagggatacagataccgcgcaacaataaaaaatcagttttatgtgttatgtactaagtattaagcgcaaaatgccctcagtcattttgcgcttttttttgtatggggttactgcggcacggcggaaacactcacagtgccatccgtcaccttaacggcaaaggcggcgacggaatatgcggcgtcttccgcacacaacccgtccgtcagccggaaacgctgttttttcagcggactgacaatccacagcgagccgtcatgctctgcaattaatccgcgcgacagcacactggcctgcgcaaaaggatcgatattactcagggcaaaaatgcgctcgtccggataaggacggaacagcgccacctgttcaccctttaccagcgcacacacaccggttcccggggtgatatcactgacctgacaaaccgtaatccattgactcatgattattcctccccgatcagagtgacagcaatccgctcttccgggcgggccggacgatgttgtgagcgctcacttaccatttgcacattcggatccggcagcgggctgttaacaaagtgactgaagcgtttgcgggcatgcgggttgttcaccgtttcctgccactcgcaggtcactttttcgcgcagctgcgccagttcctgctccagctgtgcattgaggctcagtttatcgctgactatcacatcccgcaggtaatcaatcccgccctcgaggctttccagccaggtggatgtccggctgagtttgtcggcggtgcggatgtaaaacatcataaagcggtcgatgtagcgtatcagggtctctttatcaaggtcagccatcagcagatcgccgtggcgcggtttcatgccgccgtttccgcagacatacaggttccatcccttgtcggtggcgataatcccgatatctttcccctgtgcttcggaacactcgcgggtgcagcctgagatgccgaatttcattttatgcggggtgcggatgcctttataacggtgttccagctcaacacccagtgcggtgctgtcgccgaccccgaaccggcaccatgccgtgccgacacaggttttcgccatccgcagtgctttggcataggcgtgcccggtttcaaatccggcggcgatcagtttttcccagatagccggtaaatcctgcttttgcgccccgaacatcgcaatacgctgtgagccggtaattttggtatacagattgtattcctgtgcaactgtaccgatagccagcagaccttccggggtaatttcgccgcccggtgagcgcgggatcaccgaataggtgccgtccttctgcatattggcgaggaaattatcgttggtatcctgtaacggcaccagatcgtcgcgcagaatatagtcattccgacaggacgcgagcagggagccgatggtcggtttacatacttcacagccgtaaccttcgccgtagcggcccagcagctcatcaaaggtagtgattttttccacgcggatcaggtgatacagctcctggcgtgaataggcaaaatgctcgcagaggtgatgattcacctcaatacccagattagtcagttctgtattcagcacctgagtgatcagcggaacacatccgccgcagccggtaccggctttggtttccgctttgatatccgcaaccgtctggcaaccgttatgaatggcctgaataatgtctcctttggtgacatcaaaacaggaacagatttgtgcactgtccggcagggattccacgccgatcgccggtttgctgccggcgtgtgccgggaggatcagaacatccggattttccggcagttcgatacggttcagtgccagttgcagcagattaccgtaatcttcggtatccccgaccagcaccgcacccagcagatatttattatcgtcgctgacaatcagccgcttataaacctcattggcttcatcgagataaatataactgtggcagccgtcgtctgtcgcatgtgtattgccgataccaccgacatccacacccagcagtttcagttttgcgctcatatccgcaccggtaaactgattctccttccccagcagatgatcagccgccacctgtgccattttgtagcccggtgccaccagtccgtaagttctgccgtgccatgacgcgcattccccgatagcatacacatccgggtcagatgtctgacactggtcattaatcaccagaccgccgcgctccgccacggccagtccgcactgacgggcaagccggtcacgcgggcggatcccggtggaaaagacgacaaaatcggtctccagcgatgaaccatcggcaaaatgcagcactttgcggctctctccgctgccggatgcggtaatttccgtggtgtttttgccggtatgtaccgttacacccatccgttcaattttctgcttcagctgttcaccgccgagcgcatcgagccgttccgccatcaggactggcgaaaattcaataacatgggtttcaatacccaggtttttcagggccccggcggcttccagccccagcagaccaccgccgatcaccacacctttgcggctgcggcgggcgcaggcttcaatggcattgagatcttcaatcgtccggtaaacaaaacagtcgcgggtatcactgcctttgatcggcgggatccacggataagagccggtcgcaatcaccagtttgtcataatgcacagtgcggccggtattggtatgcagcaccttttcctgacggttaacggtaatcacccgctcattgattaataccgaaatattgtgtttttcatagaaaccgggtttaaccagggataattcttccgccgtatgatgagaaaaataggaggagagatgcacgcggtcataagcgacacgcggctcttcgcagaatacggtgatatcgaactgtccggcgtccgctttatcggtaagctcttcggcaaagcggtggccgaccataccgttaccgatgattgctaacttgacgttgctcatttcagcctcagattttgtgtggattaaggctaaaaatacggcgatcccggtttttctcattgatgtatatcaaatgcagcttaatcaattcagcttatgtaattcattgctttaaataatttttgtcaatactccttaaggggtagtgatgtattggtttttcaaccggttatttttactcatttaatgacaaatatatatttcacgacatatgacacaatttccggattaaaagaaatatatttaactaaagggagatatctgaaataaccatccggaaaacagaaacggataacaccaccgtatatcagggggatgttatccgtacggtatgattagcgggaagatgccatcatatcagcgcgagctttgcggtttttaatactgataatcagaataccggaagcgaaagcgccgcagcaggcaaacaatgccatcaggccgaacacgattttgtaaccggtcatgcccggatagctgtcgagaatatggccgtagaggctgaagcagaacatggccggggcataaccgataaagctgcccagtgccattgcagccccggtactggactctttgatattggcttcaccaatcggcgcaaagaaaatcgcgcgctgagtgaaaacaatagtaccgaagcccagtgtgcagaccatacccaaatacaccggcatactttcgtgcggcaggaaaataaaggtgaccaggacaatcacactgataataaaggtataaaacaggtatttggtcggtgattttaaaatcttatccgcgattaatccgccgatagggccgccgaccattttcaggcaatactgattcagaataccgtaaataccggccagtgcgacaggcagtgcatagatattactcaggaacggaataaagaaggtcagtccgcaataaacggcgtagacaaagaaaatactcagagcaatcagccagacggtaccgtcttttaataccgcgctgacgccgggctttttctctttattttcaccggattcattcaccggttcggtgacggtgtgtttatcatctttcaggaacaggaagataataccaccgaccagaatagccacgccggaataaaataagatccccattttaaaaccgagataaccactgccgaaccaggcaaagaccgcaagagcggagaaggccaccacggtatcgaccacaccgcggccggtttcaaagaagccgaatatccggccctgctgtgagctgttgcccagcaggctgacagattttaataataccggccagttaagcatatcgcaggtgacaccaaataatgcccagacaaataaaatgccccagtagcccggcattgtggataaatacacacccagcaggccggttgcaattaatgagaatgaaattgtcagacggcgcggtaatttgtcagaaaaataaatagataaaaagaaaccaatggtcgtcacaattgagtttactgacatggcattaccaatctgaccatttgtcagatggaaatattcctgcatcggaacataaaaggcgtctttcagtgacggtaatttatagatagtaccgccacacagaattaacaggctgaatatagcccatctttttttatcaagcatagtgtgcctcccgactgaaaaataattttcagtcagtattgagtgttgtttttaaattaatggtgtgtagtgctgatatttttttatttatgaataacggcgagtgcctctgtctttatttcatcaatgacgttacggacataaatcagctgattgacggcatcttctttttcacgggcgagacgttcttcaatttcattttcaggtaacggtgtttcactcagctgacgccacgggatccacggatcattcccttcatttttaaaacggaaggccggtgcgtaataatccacttcttcttccagcccgtaggaaataacctgcggtttctcttcacccagacatattaatgcccgcagcatctctttaaacggcagattaccttccccggaacggaaggcggtatggccgaaaccatcaccttcttccagaatcaccgcatccttgatatgcacctgagtaatatgatcctgcatgactgccagcgcttccatcggtaattcacaggcattgatcatattgccgaagtcaaataacagcgtcagttccgggaaatcagcttcttttatcagcttaaccagctcgtggctttttaaatcttcatgctgttccagaacaaatgtcagaccggagtgctgatagtgtgtttttaaataaccgatgtctgcggaaatacggcgcagcacatcagacagtgcaccttcatagcgcggataaaaacggacagaacttgccccggttttcagtgcgattctgaccgcatcatccagggttttattatcggaggcgctggtttcaatattaatatccagatgataacgttttgctttctctgcaaaagcctcaagctgttcgtctgtcatggttgaaagagattgtgtttcaccatccagtacatgtattttgacgcccggcaaatgatgttcgtttgcgatatccagtaagtcacccggcaatattttttcaaaacgcatattcagatgataggcgtaggcatgcagatataacggtaatttatctgcacgttcaataatccggcgggcatcatcagtattcatgattcagattcctgtgtctaaagctcaacaaaaaaataaacagattcaaaccgccagtactcaatgtcgatttgaacgatattatgttccgcatcacagcggtatttttccacccggataccgggggaattcgcggtacagccgatagccttactggcggtttccggcatccgggccggtttgaatgccagtccggcagtcgtggtggtgatattgtatttttcttcccagattgccgcgaaagagtggttatccagttttgcggtaaagtccggaccggcagccgggttaatataggtctggtgccagaacactttatgcccgtccagtgccccccatccggtaatgagatacaccgcatcaccggccgcaagaccgaatttaccggtaatctccgcaggggcatcagtgaccgtcagtttgtctgtgtattcccatgacggtacccgtccctgtgcttttgccgcctgattaaaacttgccggggatttcgggttgtaattgaaaaccggcagggcagcgaaccatccgctgcggtttttgcggaagatttttccgtcattctccaggctgagcagtgcctggcgcagtgacatccggttgacaccgagttgttctgtcagcggacgttctgcgggcagcttgtctccgggcgcgataacgccggcggtcagcatggcatcgagtttctctctggcaagatcagctgcagtttgtgttgttttcatcggattggccttttggtttaaaccatattggtttatacgttacgtgagtgctattgtacgtacaagtgaggaagtgataaataaatgtcaatttgcgggatacttcacactctgccggtgatccggcgaaaatccccgttgtgaccggtttctcattccggattgataaaaatagcaggctgtctgctttattttttatcagacgggaaaataacagaaaatgaatatttatctcactggttcttataactattttatttccccgttcgtatcataagaaaaatctatgtcctgataaaaaaagctatttgattttatttgccggacacatccgctggcacagcataaaaagattaatatccgcgagctggcaaattacccggccgtgatgtacgcacagaataacagtgattttctcagtgaaatgttttttatggaagaggcgattgtgattgaggatccggaccgggttatctatacccatgaccggggatcgatgaataatatattatcaaatacaaacagttacacaatagggataggatgtcttatcaaggatatcatcccggaagaagagaacctgtttatcagtctgctcaagcagtcgccggataaaaactttattcgtgacacacagaaataatcacaccgcgaacccgctttctctctcattgccttaccggaatatcgcgggtaaggcaattgctgtattttacgcatttcagtactacgtattttgcttattaccgcatctgaaacaattccgtcataaataacagattcaatttccgtgccttttccccgggtgatcgctgtttgttaccaaattaacaattctgccaattagtgatctgtttcaacatttaatcgtgattgccgatttttgttatcccctttttaagagtgtgactaggattgaatcaattcttatgaggagagtgacgaggtaagcacgatggaaaaggaacgtatcatccaggaatttgttcccggcaaacaggtcacgctggcgcatctgattgcgcatccgggcagtgatctggcgaaaaaaatcggggttcccggtgctgaagccatcggcattatgacgctgacacccggcgaaaccgcaatgattgcgggtgatcttgccacaaaggccgctggtgtggatatcggctttcttgatcgtttcaccggtgcactcgtgatttacggctctgtcggcgcagtggaagaagcattgatccagactgtacgcgggttaagccagctcctcaattatgccgtttgtgatatcacccgcagctgagcgggtgcagttaaggatgccgtctgaatgaaacgaattgtgtttgtgggtgatgtgggtgcaggaaaaacgacattattcaatgcgttgcagggggattttgatcttgcgcgtaaaacacaggcgattgagttcaatgatgaaggcagtgttgatacaccgggtgaatatttcagccatccccgtctctaccacgcgctgattaatacgctggcagattgtgatgtgctggtttatgtccacgcggcaaataacccggagtgccggattcctgccggattactcgatatctatccccgtatgcgccgctttgcggttatcagtaaagccgatgcaccggatgcggatgtgcccgccgtgcgcgagctgctctccacgcgggggtttgaggaaccggtacttgccatcaacagccttgatcctgatgacgtcctgaaagtgaaacagtttttggccacagccgacagccaataagaggaatatccgatgaagaaactaataacggccaatgacatccgggaagcacacgcagcgggcaaaacccgtctggatgtggtgctgaaagagagtattgtcacgccggaagcccatgttgtggctgaacaattgggctttgtgatttgtgaggtggatgccgcacagaacagcgcaccggccgccgcaccgctggccgcaaccgccggaacagaacccaatatttcatccgcagagcgtcagaaaatccgcgagtgcattatcgcgcagctgcctgacggcaatgtcaccgaaaccctgattgcacaactggtcgataaagtggtgcaggagcgtatcgcgcagattaaagcgaaagtggcggcattcaaaccggcggaagagaacactgataccccgaatacccagagctaccgcagtgtcaccggcaaaggcggcattaaagtggtcgacagcagctcagtgaaattcggtaatttcgatggcgcgggtccgcaccgtgtcgggattgcggatctgatcactgcgcaggataacagcagtatggctgccgggtttatgcagtgggaaaacgcattcttcccgtggacgctgaattacgacgaagtggatctggttctggaaggcgagctgcatgtgcgccatcagggcgaaaccatgatcgcgaaagccggtgatgtgatgtttattccgaaaggctccgcgattgagttcggcacaccatccactgtccgcttcctgtatgtggcctggccggctaactggcaggattgctgaggggtatcgccatgacctttatcactgaagactggctgcgggataactttacgctgagcgaaggcagtgaaattcatctgcctgctgacagccggatgacaccatccgcccgtgagctgatcgaaagccgccgtttacaggtgaaatttcaggataaacaaggtcgtctgtttgtggaaacgccggatgaatccggtaaaaccgaaacggctgtccctgacctgaaagcggtacacgggttaaccagtaaggataaagcggatgtcgcggcctgcgaattatgccatcagccggtggcgaaaaagccggacacgctgacacaccttaacggtcacaccatggtggcgaaaaatgatccgcgtctggccttccgcgccgcgctggatgccaccattgccgaagccgtctggttacagactgaatttgcacagacgccgctgaaaggctggctggcggatatccgctctgtgctcggcaatattatgcgtgccgatgcgctcaatgaaccgctcggtgagcagagtattgcggatctgaacgcggatgagatgcacaagctgtctcataatccgctgaaatacctgggtcatgaccatatcgttccggatgtgagtcacggccgtgatgcggcggcgctgaacctgctgcggaccaaagtccgtgaaacggaagtcagtgcggcacgtatttatatcgattgttattttcaggtcatccgccctgacattatgcaggcgcttaaccgcctctccagtgcggtgtatgtcctgatggtgatggtggtgcgcgaaggcggcgtaatgaccacacaggctctgaaacaggctctgatgcaagggggaacacatgctcattgaacgatgccgtcagcaggcaaaactgaacccgccgcgggtggttctgccggatgcgctggatgagcgcgtgatccacgccgcccgttatctgaaacaaaatggtctggcggagcctgttctgctggcaaacccgtttgcgctgcgtgatttctcgctgcgtaccggtgtcattatggacggcctgagcaccattgatccggacagtgcggatgagtggcgtgcagagtttgcggataccatcaccgcgcgcctcggcgaaaaagccccggaagatgcggatgaggccatgcgccagccgctgtggttcggtgccgccatggttgccgccggaaaagcggatttatgtgtggcggggaatatctcgtcaaccgccgctgttctgcgggccgggctgaaagtgatcggcctgaagccgggcgttaaaacattatcatctattttcatcatgttgccgccgggaacggaaggcaatgtgctgggtttcgctgattgcagtgtcgtacctcaacccacttctgcacagctggcggatattgcgctgagcagtgcggaaaccttcacggcaatcaccggtgaaaccgcgcgtgtggcgatgttgtctttttcaacagcaggcagcgcgaaacatcctaatgtggcgatggtgcagcaggcggtggaaattattcatgcacgcgccccgcagttacaggcggatggtgaactgcagttcgacgcggcatttgtgccaagtgtcgctgcgcaaaaagccccgaacagtgagttaaaggggcgggcaaatgtcatggtctttccgtcactggaagcaggcaatatcggttacaagattgcccagcgtctcggcggttaccgggcactcggcccgctgattcagggattaaatgcaccggtgcatgatttgtcacgcggctgtaatgcccgcgacattattgaactggtgctggtagcacaaacacagttagctcaggccggacaacctgtccgccgcactgaagcagaaagcgttatttaaaccggtccctgatgggatctcaatgagaggaaaatatcatggaagcattaggactgatcgaaactaagggtctggttgcattaatcgaagcatccgatgcgatggtcaaagcagcacgcgttaaattagtcggtgttaaacaaatcggcggtggtctggtaacagccatggtgcgcggtgatgttgcagcatgtaaagcagcgactgacgcaggtgcggcagcagctcagcgtatcggtgaactggtctctgtacacgttattcctcgtccgcatggcgatctggaagaagtgtttcctatcaaaatgtccggcgataaatcaatcgattaatcgttgttagcgtggcgtgcttctgacgccacgcgattttaatctccccggtttttttgctgtcactcagacggcaggggatttttttacctgaaatccgtagccggctgtattcaggctgctgaaatataaagagaggtgaacatgaaactggctgtcgttatcggacaaatcgtgtgcaccgtgcgtcatcccggactggaatccgacaagttactgctggtggaaatgattgaccgccaggggcgtcctaacggtgaggtggccgtcgcaaccgacagtatcggtgcgggtaatggtgaatgggtgctgatcgtcagcggaagttcggcgcggcgtgctcagagcaaagaagcgtcaccggtcgatctcagcatcatcggcattgtggatgaggccgttatggaaagtcaggtgatttttcataaataaatcgccgcaacgagtcacagaaagaggcgtgggtgaatatggatcagaaagaaattgagaatgtggtaaaagcggttctggccagcatgagtgcgggcacacaaccggcggctgcatcagcggcaccacagcaggcggcagcctcacagaataacggtttcggggtgtttgaatccctggatgatgccgttcttgccgccaaagaagcacagaaatcattaaaaactgttgaaatgcgtaatctctgcatcggcgcaatccgccgtgcggcaacagaacatgcccgcgaactggcggttctggctgttgaagagaccggcatgggccgcgtggaagataaactcgcgaagaacttagcacaggcaaacggcaccccgggtgttgagtgtctgcgtcctgaagtgttaaccggcgaccacggtttaaccttaatcgaaaatgcggcatggggtgttatcgcctctgtcacaccatccactaacccggcggcgacggcaatcaacaatgccatcagtatgatcgccgggggtaacagtgtgattttcgcgccgcatccggcagcgaaaaaagtctcacagcgcaccatcacgattctgaacgaagccattgttgccgcaggcggcccgaacaacctgctggtgactgtcgccaaaccggatatcgaaaccgcacaacgtttattcaaatatccggggatcggcctgctggtcgtgaccgggggtgatgcggtggtggaatccgcccgcaaacacaccaacaaacgtctgatcgctgccggtgccggtaacccgccggtcgtggtggatgaaactgccgatatcgaacgtgcggcgaaagccattgttcacggtgcatcattcgataacaacatcatttgtgcggatgaaaaagtgctgatcgcggttgactgcattgcagacaaactgatcaccgaaatgcagcgtaatcacgcggtattactgacccgcgaacagagcgagaagctgatcccggttctgctgaagaatgttgatgaaaccggccacggcactgtcagccgcgactgggtaggccgtgatgcagcgaaaattgctgcggctatcggtatgactgtgccggcagatacccgtctgctgatcgcggaaaccgactgcaaacatccgtttgccgtcactgaactgatgatgccggttctgccgatcatccgcgtgaaagatgtggatcaggcgattgacctggcggtgaaactggaaggcggctgccatcataccgcagcgatgcactccaataacatcagcaacctgaaccgcatggcgaatgccatcgataccagtattttcgtgaaaaacggaccgtgtattgccggtctgggactgggcggcgaaggctggacaaccatgacgatcaccacaccgaccggtgaaggtgtgacctgtgcgcggacgttcgttcgtctgcgccgctgcaccatggtggattcattccgcatcgtgtaagccgctgcggtggggcctgcgggcttcaccgcttttttcccggttagtgtgagttactcacgttaaccctgacgttatgttttaaaccggaggaaccgatggttcaacgcaatcaggaatggctggcatcgcgcttacagcgggcagcggaaatctgtaatcagccgcaggcgggtgatcacaaagatgcgccgttgtggctggggatcgatctcggtacctgtgatgtggtgtccatggtggtgaatgcggaaggtcagccggtcgcggtgtgcctggactgggcagatgtggtgcgcgacggtgtggtctgggatttcttcggtgcggtaaaaatcgttaataaacatctggatgcgctggaaaaacagttcggtttccggtttgaggtggcgacaacgtcattcccgccgggaacagatccgcgtatctccgtgaatgtgctggaatctgccggtctggtggtcgccagagtgctggatgagccgtctgcggtcgctgacatgatggggctggataaagccgctgttgtggatatcggcggcggtaccaccgggatcgcgattgtgcagaagggcgaagtgacccgctccggcgacgaagccaccggcggtcatcatatttccctgaccctggcgggcaaccagcgcattgaactggaagatgccgagcagatgaagcgtgagcgcggtgaaagcatctggccggttattcgtccggtatacgaaaaaatgacggatatcgtcgacgatcatattcgcggtgaggatgtgactgaactgtggctggcgggcggctcctgtatgcagcccggtgtgcagccgctgtttcaggcgcgtttcccgcatcttaccgtggtactgccacagcattctatttttatgacgccgctggcgattgccgtctgcggtgtatctcagggagaaaaccgtcatgccggataatcgtttacccgcggctgaggttcagtccgctatctatcaggcgcttgatttggtgaatgcccgtcaggtgcgtgagttttctgtcccgccgaccacattaatcggcccgggcgccgtcggccgcagcggggatgttcttgcggagcgcggaattaagcacgtttttattatggtggacggcatgctgttacaggccggtcttaccgatgtgctggagcgtaatctgagccgcagcggcattgcatatgaaatctggccgtgcccgccgggcgagccgatggataaagatgtgttccgtaccgttgagcatctgctgagcgtgcagtgcgacggcattatcgccctcggcggcgggtcggtgctggatgcggcgaaagccgtggcggtgctggctgccaatccggatctgccgctggcggatatgatgccgggtgcggcgctcaatccgcgtctgccgtttatcgctatcccgaccactgccggtaccggctctgaagcgaccaatgtttccgtgattattactgcggaaaatcatatcaaactggtgctggcacacagccagttactgcctgatctcgccattattgatgcctgtctgacactcggtgttccgccgcatgtgacagcaatgaccggtatcgatgccttaacacatgcgattgaagcgtatgtggcgagcaacgtcacgccgctgacacaggcgctggcactgcgggcgatctccatgatcagccacgcgctgccgattgctgtcggtcaggggcatgatatcaaagcccgtgaggacatgatgctggcttcttatatggccgggatggcgttctccaatgccggtctggggctgtgccatgcgatggcgcatcagattggcgcggcatacaacattccgcacggcaaggcgaacgccgtcatgctgccgcaggtaatgcgttttaaccgcctggtctgcaaacaggcgtacagcgaaattggtcatgcgctgactcagcggccgatgaccgacatggaggccattgaggccgtggaacaactgatcagtgacgtggaactcgcgcagacgctgccatccctgggcggaaaacgtgaggatttcgatggttttgccaaagcggcattgcaggatatctgcatcaaaaccaatccgcgcgcggtcacagcggctcagataacggcgatttacgagtcagcctgagtcaatcaataagaacagcctgcgcgacaggcacggaaggagaagggtatgggcattaatgaaatcatcatgtacatcatgatgagttttatgctgatagcagccgtggatcgtatcttcagccagttcggtggctcagaggcaatcctcggtaagatcggcctgggtaaagtcgggaaaggcattgccggttccggtgaacagtttgaagaaggctttatggcaatgggtgcactgggtctggcaatggtcggtatgaccgcgctggcaccggtgatcgccatgctgctcgggccggtgattattcctgtctatgaaatgctgggtgcgaacccgtcagtgtttgcgggcagtattctggccatcgatatgggcggcttcttcctcgcgaaagagctgtccggcggtgatgtggcagcgtggttatattccggcgtactgctggcatccatgatgggtgcgaccatggtgttctctatccctgttgcgctgggcattatcgagaagaaagatcgccgtttcctggcactcggtgtgctggccggtatcgtgaccattccggtcggctgtattgccggtggtctggtggcgaaattttccggtgtggaaattgacggtcaggtcgtggatttcagcatgaccatgctgctggtcaatatgatcccggtgatcatcgtggcggcgctggtgtgcctcggtctgaaattcattcctgagaaaatgatcaacggcttccagatcttcgccaaaatccttgttgccatcattactatcggcctggccgcagctgtggcgcagttcactgtgggctggaacctgattccgggcctggatccgattttcatggcagaaggtgatgtgccgggcaaagtgatgcgcgccatcgaagttatcggttctatctctgcggtgctgttaggggcgtacccgatggtgctgctgctgacccgctggtttgaaaaatcctttatgaagatcggcagcctgctgaaaatcaacaacatggccgcaggcggtatgatcgcgactctcgcgaacaacatcccgatgttcggcatgatgaagaaaatggatacccgcggcaaaatcatcaactgtgcgttctccgtgtccgctgccttcgcactgggtgaccacctgggctttgtggccgccaacatggcaccgatgatcttcccgatgattgcagggaaaattatcggcggtatcactgcgattttcgttgccatcatgatgatgccgaaaaatattgagcaggaagatgccgctgcggccactgaagctgctgctgaaagcgtcgcggaggagaaataagcatgaaaaccctcgaactcttaagtgtcggtattgacgtgggcaccaccactacacaggtgattttctcccgtctcgctctggtaaaccgcgcggcggtgtcacaggtgccgcgttatgagtttgtggatcgcaaaattatctggcagagcccggttctgttcacgccggtggataaagatggccacctgcgtgaggaagagcttctggcactggtactggatcagtacgccgccgccgggatggacccggcgacgattgactccggtgccatcatcattaccggtgaaaccgccaaaacccgcaatgcgcgtccggctgtggtggcgttatcccagaaactcggggatttcgtggtcgccaccgccggtccgcacctggaatcagtgattgccggtttcggatccggtgcccagacactttctgagcagaagatggcgcgggtactgaacattgatatcggcggcggcacagcaaactatgtgctgttcgaagccggtcatgtgatcagttccgcctgtctgaacgtcggcggtcgtctgttcgaaacagataacagcggacgcgtcacttatgtgcatgcaccgggccgtcttatcgcccgtgattgttttggtgagcagaccgatccgatgtccctgacaccggcacagctgaataccattgccgaccgcatgagtgagctgctgtatgaagtgatcagcggcaacctcaccccgctcgggcgtgagctgctgatgacggacggcctgcctgcggaaagttctttttatgcggtcacactgtccggcggtgtcggggagtgttacagcaatccggaaagcggtaatgatttccgtttcggtgatatcgggccgctgctggcacaggcgatacaccgcaatgcggatttcagtgctttaccgatgcagactccggcacagactgtccgtgccacggtgatcggcgccggtgcgcatacgctgtctctgtccggcagcaccatctggctggacagcatcacgctgccggtccgcaatattccggtggtgcatccggcgctgggccgcgcggatgatgaagatctggtgaatacctggagccgtgccctgacgcagatggatcttaatccgcaacaggatctgtacgcgctggccctgccggaatcactgccgactaactacgcctcggtacaaagctgtattgatgccctggaacgctttaccaaaacatacccgaacaccatgccgctgctggtgatcgcgggacaggatttcggtaaggcactgggcatgctgctgcgtccgctgatgaacggccgcgaactggctgttatcgacgaagttatcacgcacacaggcgactatatcgacatcggcacgccgttattcagcggctctgtcgtccctgttactgttaaatcactcgcatttccttcctgagggaacgtaatatgaaattgaaaaccacgctgtttggtcagacctaccagttccgggacgtgaaagacgttctcgcgaaagctaacgaactccgctccggggacatcctggcgggtgtcgcggccagtaacgcccaggaacgtgtggcagcaaaacaagtgctgtctgaactgacgattgcggatgtccgcaacaaccctgtcgttccgtatgaagaagactgcgtaacccgtctgatccaggacgatatcaacgaaaccgaatacaaccgggtcaaaaactggactatcggtgagctgcgtgagcatgtcctgagcgacacgacctctctcgataacatcaatctgctgcgcaaaggcctgacctcagaagtcatcgccggggtggcaaaaatctgctccaacgcagacctgatttacggcgcgaagaaaattcctgtcgtgaaacgtgcgaataacaccatgggtctgccgggccacttcagcggccgtttacagccgaacgatacccgtgacgaagtgcagagtatcgtggcacagatttatgaaggtctctcttacggctgcggtgatgcggttatcggtgtcaacccggtaacggacgatgtggataacctcagccgcgtgctggatgctgtctacggcatcatcgataaatacgatatcccgactcagggttgtgtactggcgcacgtcaccacacagatggaagccatcaaacgcggtgcgccgggcggcctgattttccagagcatctgcggcagtgaaaaaggtctgcgtgagttcggtgttgagctggaaatgctggacgaagcccgccacgtcggtgcgcagtacaaccgtatcgccggtcctaactgcctgtactttgaaacaggacagggctctgcactgtcagcgggcgctcactacggtgctgaccaggtgactatggaagcccgtaactacggcctggcgcgtcactatgatccgttcatggtgaacaccgttgtcggttttatcggacctgaatatctctataacgaccgccagattatccgcgccggtcttgaagatcacttcatgggcaaactgagcggtatctccatgggctgtgactgctgttacaccaaccatgcggatgcggatcagaacctcaacgaaaacctgatgatcctgctggcctctgcgggctgtaacttcatcatcggtatgccgctgggtgatgacatcatgctcaactaccagaccactgcgttccatgacatcgcaactatccgtcagttactcggcctgcgccctgcgccggaattcgaagcctggctggaaaaaatgggtctgatggaaaacgggcgtcttaccaatcgtgccggcgatccgtcactgttcttctgattttcggggtaaatcaccatggatcaaaaacaaattaatgacatcgtacgcagcgtgatggctcagatgggacacacgggcgaaaacgtacaggcggttgctgcggcaacgcaggctgtgctgaatcagggtaatacgtctgttgagtccgttgagtgggatctcggttcaccggaagcaaaacagtggatcggcgtgcagaacccgcaccgtgcagaagtgttacaggaactgcgtaacagcaccggttcccgtgtctgctccggccgtgccggtgtgcgtccgcgcacccagagcctgctgcgcttcctggctgaccactcgcgctccaaagataccgtactgaaagaagtcccggcggaatgggtgaaaaaacagaacctgctggagttacagtctgaaatcacagacaaaaaccagtatctgacccgtccggatatgggccgtattctgaataaagaatccatcgaactgctgaaaaccaagtgtgtgcaggcgccggatgtgcaggtcattatctctgatggtctgtccaccgatgctatcaccgcaaactacgacgaaattctgccgccgctgatgaaaggtctggagcagtccggtctgaaagtgggcacgccgttctttgtccgttacggccgcgtgaaaattgaagaccaggccggtgaagtgctcggcgcgaaagtggttatcctgctggtgggcgaacgtccggggctgggtcagtctgaaagcctctcctgctacgcggtgtactcaccgacagtggcgggtacagtggaagcagaccgtacctgtatctcgaacattcaccgcgcagggacaccgccggtggaagccgccgctgttatcgtcgatttagccaaacgcatgctggagcagaaagcgtccggtatcaacatgaaccgttaacggggaactgaatatgcctgcattagatcttatccggccgagcgtgacagcgatgcgtcttatcgctaatgcacacgaagatttctgccgtgaactgaaattaccgaaacacatccgcagcctcggccttatcaccgcagactccgacgatgttgcttacattgccgctgacgaagccaccaaacaagctctggtggaagtggtttacggacgttccctgtatgcaggggcgtcaaactcaccatcaccgacctccggtgaagtgatgattatcctcggtggcccgaacccggcggaagtccgcgcgggtctggatgccatggtcgccaatatcgaatccggcgcggcattccagtgggcgaatgacaaagaagataccgcattcctggcgcatctggtctcccgtaccggctcttacctgtctgatggtgacaaagttaaacacggtgacccgattgcctatctggtggcaccgccgctggaagcgaccttcgggattgatgccgcactgaaagccgctgatgtgcagctggccacttatgtgccgcctccgtcagaaaccaactactcagcagccttcctgaccggcagccaggcagcatgtaaagcagcatgtgatgcctttaccgaagccgttctggatatcgcgcgcaatccggttcagcgcgcctgagcagtgcagtcagtcgtcagttcagtcattaacacaggagataggtcatgatcgattcactgggattacttgaggtatacggcctggtgtccggcattgatgcggcggatgcgatgctgaagtcggccaatgtccgcatccttaactatgaaatggtgatcccggggatggtgacgcttgttgttgagggtgatctggcggcgtgccgtgcggcggtggatgcgggcattgcggccgcaaaccgtaccggtaaagtgatcggccataaggtcatcggccgtccggatggtgataccgagtggctggtcaccggtttcagcggtgtaccggtgaaggtaaaaccgcagtctccggcaccggttccggtatctgaaccggctccggcggcagctgtttctgccgctgcaccggatgcggatgccatgatgatctttgccgctggagccaaacaccgccacggcgtgaccgccggagaagcggccatgcatttcagttgcctgatagaggacagccgtgatgtgctggaagacctgtttaaacagggcaaactgcgcaaacgcggcagccgctaccgggtaaaacaggagggaaaccgcgatgagtaatctgatgccgggtctgcatgagtgcgggcccgaaatcattcgtcagcgtgtgcaggatgcaggggttgtcggtgcgggcggggcggggttcccgacccacgtcaaactggcggcacaggcggaaatctatctggtgaatgcggctgaatgtgagccgcttttgcaggtggatcagcagctggctgtccttgaggcggatgcgatgatccgcggtttgctgtatgcgatgcgggccaccggcgcgaaagagggcattattgccatcaaaggcaagcatcaggcggccattgatatcctgaatgcccgcgtgccggattctgtccgtctgcatatcctgccggatgtttatccggccggtgatgaagtgatcaccatctggctggcgaccggccgccgggtcccgcctgcggcactgccgctgtctgtcggcgtggtggtcagtaatgtgcagacgctgatcaatgtcgcgtatgccgttgaacaggaacaggccgtgatacaccgtgtcctgacggtgaacggcgcggttcatcatcctgttaccgtttccgttccggtcggcaccacactgcgtgaagtgctggcactggcaggcggatccaccatcagcaacccggcgtatatcaacggcgggccgatgatgggcaaattacagacatcccttgatgatgctgtgaccaaaaccaccggcggcttattagtcctgccggatgaccatattttaattcagcgccggacccgttcggagcgcacggtgatcaaccaggcgcgtaccgtatgtgaacagtgcggcatgtgtaccgagctctgcccgcgtcatatgatcggccacgaactgccgccgcacctgattgtccgcgcggtggggtatgagcagatctccgcaccgtcagccgttgttgcggcactgacctgctcggaatgtgcgatttgtgaagcctggtcctgcccggtggagatctcaccgatgcgcctgaatcagatgctgaaagtgaagctgcgcgaagaagggatccgctacgaaggtgaactgcgcccggaagatccgatggctcagcaccgcatgctgccggtcaaacgccttgtccgccgtctggaactgacggaatacatgcacaaagcgccgatgactgatgagatctacgcgccgcagcaggtgattatcccgttacgtcagcatatcggtgccccggcggtaccggttgtcagtgaaggggataacgtcacggcgggcatgctgatcgccgctgtcccggaaaaagcactgggtgcgccggttcacgccagtatcagcggtgtggttcgccatattgacagctcggctgtcacgatagagaaggaataactatgcacagtgcaattgcgatggtggaactgtccagtatcgccaaagggatggaagtcactgattttatgctcaaaagtgcagaagtcactctgctgatgggcaaaaccgtgtgtcccggcaaatatgtggtgatggtcggcggtgatgttgccgccgcacagcaggcaatgcgctgcggtgtggaaaaaggcggtgctcaggtagtggatgagtttctgctcagtaatatccacccggatgtgctcccggctatcggtggtgtgacggatgtgaatgcccgtgaagccgtcggggtagtggaaacctttagtgtcgcaacctgcattgaggcggcggattttgctgttaaagcagccggcgtcacgttaatacgacttcatatggcgtatggtatcgggggtaaatgttactttgtgatgagtggcgatgttgcagacgtcgaaaccgccaaaaaagccgcatcacaggtcgccgcagataaaggtgcgctggtttacagcatggtcgtaccgaatcctcatcccgatttctggcagcaattggtcgctggttaacatttatggcggccgttcattttggggaaaaaataatgatgaaaaaaatcacaccagatttacatcaccttaatgatgaagtgccgcatgaccgcgatctcagccctatcgtgatcgagcagaattttacacagcgttatacgcatgatgcctatgatcaggcgtgtgctattaccgcctggcagcagctttatgatcagctgacgccgggccggtttgaaggggaactgaccgaaaccctgtttgacgggcttcaggtattccacgaatacactaatctgtctctgcgccagtcctgtatggtctggccgaatgccttctggttcggcattccgggggagcagcagaataccggctatatcggcaatcagatgctgtgccggcagaaaatagccgtgcgtccgggcggaaaagaatttgaactgagcacgccggatgactatcacattcagggactggtgatctctcacgatatcctgaaaaagcactctgtggtgctgcaaaacccggagcggctgatgaatctgctcagcgaaaacccggctgtgggggtgaaccccttcaaaaaagaggcgatctggcagtatatccgccatgccctctggcactccaaaattgagcaggaacgcaaccgtaccgtcagccgtgtcctgagtcataacctgctgacggcattcctcggcttgctggaagatgccagcaccgtggccgatgagcactacaccaaccgtgtgaactacctgaaactggtctctaaagcccgtgaatacctgtttgaaaatgccaccgaaccggtgaccgtgctggaattgtgtaatgagctgtatgtcagccgccgcacgctgcagaatgccttccagcaggtactgggtattggcccgaatgcttatctgaaaaccatccggctgaatgctgtgcgtcgtgagctggtcagcccgtattcaaaacagactaccgtcaaagacgcagcaatgcagtgggggttttggcacctggggcagttcgccactgactatcagcgcctgtttaatgagaaaccgtcggagacactgagccgccgtctgatgtgattgttgttctgcttccgctttctgacctgcatcgtgttttctttccggcaggtcagaatggcttcttctgagtcaccgttttaaaataccgcttctgatctcattttcagcatcttgctgtgaatattctctgtaaggagaatttaaatatctaattagttctatatttattaattggctatttataattctactgagcaacggagtattcaggtatgaaaaaccgcaacaagattctgctgtccgcgttgatatctctctttatgacccctgcgtttgcacttccttctgtgacagttctggccaccggcggcactattgccgggggcggggaatcgtcggtttcgtccggttatcaggccggaaaagtaggcgtcaatgcgctgattgatgccgtaccggaagtcaaagcactggcagatctcagtggtgagcagattgtgaatatcggctcacaggatatgaatgacaaggtgtggctgacgctggcaaaagaaatcaaccggacctgtgataaaacggacggatttatcatcactcacggtaccgatacgctggaggagaccgcgtattttcttgacctgacagtatcgtgccataagccggttgtgctggtgggggcaatgcgtccgtccacggcactgggcgcggacggcccgctgaatctctataatgcagtggttttggcaacggataaatcggcggccgatcgcggcgttctgatggtgatgaatgacaaggtgattagcgggcgggatgtggtcaaaatgaataccacggaagttcaggcgtttgaagcggtgaatgccggggataccggatttatccataacggcaaagtgacctattatcaggcagcgctgccacggcaggccggtgcggtgtttgatatcagtaaactcagcgaactgccgaaagtcggtattgtttataattatgccaatgcttcagatgcgccggtaaaagccctgcgggaagagggaaatgccgggattgtcagtgccggcgtgggtaacggcaatatgtataaaggcgtttttgatgcattagccgccgcagccaaagagggcgtggtggttgtccgcgccagccgggtgccgaccggttatacaacacgtaacgcggaagtggatgatgatgtatacggttttgtggcttccggcagactgaacccgcaaaaagccagagtattgctgcaactggctctgacacagaccactgatccgcagaaaattcagtcattcttcgaaaaatattaattaaattattttcagaccgcagtctctcttataaggggctgcggttttttattctcggatcggttttcatgcatttattgttatgttataacataacaataaatgagtttaaggtgatagttatcattaatgataattaacaaatgaaacaaaaaagacacagctgcctacaggaatttaaagaaaaaaggggctgaatctgtccgtattcacaaagcgggaaaaagaactgttctcatatttacccattgaattcattcagtatattgtctgcttctgagtcagagcgactctgtcttcacggcatgtatcacaacaaaataataaaagagaaaggtatgaaatcagttaagtttgcattggtaccgttatccgccatggtgctgttatcgttctgtgcgcaggccggaacactgggaaataatgacgacacgattattgtccgatcttccaccattgaatccaccaccgttaatgaactggccgactacgggaataaattacaggttattacccgtgaggaaattcagcgttccgggccgtcatccgatttaaaccaggtattacagcaatatgtgccgggattatatgtctctctgggacaaggggcttacggctacggtaaatattcctttatgggcggccgcccggatgacaccttaattctgattgatggcgtccgtctgaacaaccgcctgttcggcgggatctatctcgatactctgccgctgattgcgattgaccgcatcgaagtgttacagggggcgcagagtctctctttcggtactcaggcgatcagcggtgtgattaatattgtcaccaaaaaaccgacctcagaggtactgtccggtgaattcagtgtcggcgcggatacggataaaggccgttacggagagggttacgtcgagaaagcgtttgataacgatatcggcaaaaccggtctgatggcgtgggtaacccgcagtaaatctgacggttatcagccatatcgcgacagtgattacaacggcacgatcggtcagaaaaagcgtggctatgacgtgacatctgttggtgtccaggttacccagactattgcggataccgcacaattgcagggattctaccagtacacacaggccgatctggatatggtgtccccgaaccatcaccgtcaggcaatgaacaaacgtgaccatcatctggccacagtttcctttgagcatttcctgacgcaggataccagctactcaatccgtgcacatcttaatgactggaatacccgttatgaccgcagccgctatctggcggacggctccgtggatattcagaatgatgattcttactggggattccgggactacggcgttcaggcacagatcaaatcttacctgttcggggataatgagtttgtcgtcgggacagataaccagtggtacaaaggtaaagatgaggtcatgaagatcgaaacggataccgcgaaagccaatgccctgtatttacaggtgcggccggatatccctgtcttaccggagctgaaaccaagtctcggcgtgcgttatgaacgctttgaaggcggccaggatgcaaccgtctggatggcaagcaccaaatatgaggtgaatgaaaagctcaatttacgcggccaggtgggaacagcatttaaactgccgaacgctgagcagttatatgtcaaagatgaaagtaagcaaaccatcggtgatgccaacctgaaagcggaaaccagtaaaaacatcgaagccggttttgactacctgacgaagtgggaaaacggcggtgcatggcagttcggtgcaacggcctacgcccgtgaaatcaatgatctgatcacgacagtgaaagtcggtaaatacgataaatgggttaacggtgatggtgaaatccgtaccaaaggtgtggtactggcgaccaaactgaactttgatgagtcctggtatgtctccggggatatcacccgtaactggctggataccaaaaacggcgcgacactcaacgatatcccggaactctttacccgcggccgcatcggttatgacgccccggcaaaacagtggggtgcggaactggctgcccgctatgtgggtgaactgaaatccggcggtgatacctacggccattacaccgtgtttgatgccagcgcgtatctgtatgtggatcatgcgcagcagcataagctcacgctgctggtggaaaacctgtttgaccgcgattacccggcgggtctgaccagcaacggcctggaaaaagtggacaacctcggtcgtccgttaaccgctgaactgcgttacacctaccgtttctgaggacactgagctatgggaaagaatgtcacactgtatctgaacacgttgcagaatgaggcgtgcttatctgcggatttctggctgtcactcagtgagaagggctttcccggtgataccgcctgctgtgtgggcagcggggcggtattgcatcagctgaaggaaacggtcacaccggagacccgctgtgtcctgctgatggtgctgacagacccggcgcaatccggtgaaaaactgatgtctctgacgtcggcgctggagctggagatagcagagtattacccgcagttacgggtgttccggagtttgtgtgtacttaccgggggggattctgcggcagatgccaaacaggccggtgacgtgatgacggaactggaaaagcagtcaaacagtcgtgagccgaaagctgaatccaacccgaactgggaaaaaacaccgccataccgctatcaccttttcttctgtatggggccgcgctgtgtctgccggggagccaaatccctgctgatgcagctgcgccatcagcttgtggtgcggaacctgtttgaaaatgaaaacggcgtgctgctgacccgctctcactgtcagtatccctgcaaccagggaccgctggtaacggtctatccggataatttatggtaccggctgaccacgccggaagagatccatctgtttgtttctgaacagatagagcagggaagagtggtaccgtcgttgctggcggatcataaataaaatgaagattacccggtatgctgtcagtgtgatcctgttgctgctgtctgcaggggctgcggcaggaaataaatgcgatccgctgtgggataaaaccgcgccgccgcagcatatcattgccatgaatcagcatgccgctgatatggtactggcgctggatgccgggccgcagatgctgggcgtgagttatattgatgattcagcggaggcactgaaatcagggcgctatcacggtattccggttttttcggccaaataccccgcgacagaaaaactgatcgcctccggggcagattttgtcgtagccgggttttcctctgcctttatggcttcgatgggcgggcaggatgatctgcaacgtgccggtatcggcagctatctgatggcattttcctgcgaacgtcaggcatacagcggatttgacagtattaaaattgatttgcagcgcctggggcgggtcctcgggcgggaaaaagaggcggatgccgccgttgcccgtatcgatgccacgctggcgcaggtaaaatccctgccgccgctgccccggaaaccggtgattttttacctcgacagccagagtgacaccctgatgtcacagggaaagaaagggtttatgaccgaagttatcaccctggccgggggcgaaaatgtgtttatcgacatgccgatggcaggtattcacgtctctccggaaacactgctggataaacagccggactatattattctcgccgatgcggtctggtcaccggcagaaaagaaaaaagcctggctggcaaatcatccggcgctgtctcacctggaagctgtcaaaaacggacgttacattgttattccgttcagcggcgtttatcccaacgtcaaaagcccggatgtgttgctgacgatagcagaagccgtcaggaagtaatacaggcggaacacggttttattcttcgtctgtttccagattacggataaaacggtaatcagccgacgccggtttcaggcggtacagtgccgccgggcgaccgcgttcagcccgtttttcaccggtatcaatcagcagatcggcctgttcgagacggcggcggaatgattttttctgaatcggctgaccaatcagaatttcatgaacgtgctgtaattccggcagggtaaaggtttccggcagggcgaatcccggcacgacggaatagagggatttctggcgcagccgcgctctggcctgacggataagtaactggtgatcaaacgccaatatcatattctctgcttcatccagcggtatccatctgactgaattcactgtgttaatttgcttttcacacgcctgcatggcaatcagtgccgtatagcagacggtgactgaccagccgcgtttgtcccgctgaccattgccgaccgtacataactgctcaatgtacggcggtgtgacaccggttttttcccgcagtttccgcagtacggtatcttccagagtcttatcctgtgcctcatccacaaaaccaccgggcaatccccatttgcctttctccggatgttccgcacgttcggccagcagcacatgcagggtttcattgtgataagtgaaaagcacagcatcaacagtcaccaggggcgacaaaaaatcacggcgctgataaccggcgaggtaagtttgttcatccatttgcgtcacatcctgaaatcgggataagtcattctattgtaaggagagaaatccggattgcaaattaaatgtcattcagacactaattcagcttgacattaatagtgtcaataagtcactatttgttattgtcataacgacactaatgaggtgatactatgtttaatttaaaattctttaaagcagacccgtccacatttgttatccgttccgtgaacggtcatgtcaaaagtcagggacaagggctgagcttctggtacaacagtgcgaccacatcgatcgccgcactacccttaagtgcgcaggaaaccccgtttattttcaatttccagacagcggatttccagagcctccgcgttcaggggcaactctcctttcaggtcagtgcgccggaaaaaacggccggagtgcttaactttgtactcaaccgggacggaaaaacctacgcgaccgacgacccgatgaaactgaatgaccggattgtccgcgcggcacaaaccattatccaggcggagatccagtccacgccgctgcgccgtgcattattgctcagccagtcgctggtggcattggtgcagtcacgtctgtcacagcaggcggcgcttgaggctctggggatcaccattctggatttctctgtcaccgcgattaccccgacacctgaaacggcccgcgcacttgaggcggaagcccgggaatccctgctgaaagaggcggatgatgcgatttatgcgcggcgtaaatcctccgttgaacaggagcgcacgatcaaagaagctgagctggagaccgatctctctgtgcagaaaaaagagcagcagatagaggaatcccggctggaaaacgaacgcgcactgttgcgtgaacaggcggcaatggcgcaggagcggctggtggcagagattggtgaggagcagcagcgtcagacactggtttctctcagtgccgataatcagcgcgttcagtccgatgcggatgcgtatgccattgaaaccaaaatgaaagcgtaccgtgagctgccggtggagaatctcaaagccctggcactgagccggatggcgccggagcagctgatggcgatggcctttgagtcactggcacagaatgccggaaaaataggtgagctgaatatcgcgccggatatgttcagtcagatgatgaaaaaagtgagcaaagcatgagccgccgggatgaggtacggtttgtcctggtcacacagaaaacccggttacaggagctgatcgcccgtttcaatacctggccgcaggcgaagttttatctggagcataacggcatctccgtgagtgattatctcgcggagcatgatcgctaccaggcgcagctgacagaggcgaaacgtattttgctgcaggcgggacaggtacagattccggatcgcacgctgctgccggggtatcagttttctgaccgcgatattgtggtgattatcggccgcgacgggctggtggcgaataccctgaaatacctgaacggccagccggtgattgcggttaacccggatccggaacgctgggacggtatactgctgccttttgaactgccgcagctggcatcggtggtgatgcggacactgaacctggatatgccgtcgaaagtcctgagttttgcacaggcggtcaccaatgacggacagaaaatgctggcggtcaatgatctgtttatcgggccgaaaagtcacacatcggcccgctatattctcagtcacggcgggcaggcggaggcgcagtcttcctccggggtgattgtctcaacagggctcggttcgacgggctggttacagtctgttctggccggtgcgctgggcgtgaccggcggcagttcacatccgctgcgcgccgggatcgcctgggatgaaaagcggctgcagttcagtgtgcgggagcctttcccggggcggacatccggaacctcactggttttcggggcggtcgataatacgatgacattacagcttgaatcacagatgccggaaaacggggttattttttctgacgggatagagtccgattttcttcatttcaatgcaggatgtattgtcacaatcggtattgcggatatacagggaaggctgatgtatgaataacaaaccagtgtaccgccgggcggcggataacagaacggggcacacagcgtgccccgtaaggaataaaaccacgtttgtttattgatcagatagcccagccgcccgcatagaaggcgactaacaccaccgcaataatcactgtgccggtgttgagtttacgccactcttttgccaccaggcggccgatgaccagggtgacataacccagcataataccggtgacgatattacaggtcagtacgataaagaccgcacacaccagcccggacatggcatcgacagagtcgtcgaaatccagttttgccacattactcagcatcagcaggccgacatacatcagtgctggtgcggttgcataccccgggatcaggtaagagagtggtgagaagaacaggatcagcaggaacagcacgccgacggttacggcagtcagcccggttttaccgcctgcggctgtccccgcagcggattcaatatataccgctgccggagaagcacccaccgcaccggagataatggagctgacggagtccacggtcagcgctttgccgccgttgataatctgattgtctttgtccagcaggttggcttgtccggcgacggcacggatggtgccggtggcatcaaacaccgctgtcatcaccagcgccagcacactcggcagaaccgctgtttgcagggcacccataatatccatactgaagatcagagatttaccgtccgcaccactcagtgacggcatggcgatcagcccctgataggtgacgttcgggtcaacaatcaggccgataactgaaatcccgataatcaccagcaggatcccgcccgggacgtgcattttttccagactgacaatcaccgccagtccgatcagtgacatggcgaccgggaaggaggtaaatgcccccattgccaccggcagaccttccagcgggttcttgataaccagaccgacaccgttggcggcaatcagcagcaggaacaggccgataccaatcccggtgccgtgggctatccccatcggcaggttgcgcaggatccagtttcgcaccccggtaacggaaatcagggtaaaaatcacacccatcagaaagaccgcaccgagcgcaaccggaatactgatttgctgcccgagcaccaggctgaatgcggtaaaggcggtgagtgatatagcacagccgatagccatcggcaggtttgcccacaatcccatcatgatggagccgatactggcgaccagacaggtggcgacaaagatggcacccggcgggaacccggctttgccgagcatggaagggacgacgatgacagaatagaccatggcgaggaaggtggtgactcccgccagaatctcccgtttgacgctgctgccgcgggcggagattttaaagtacgcgtccagtgcgccttttgctgccgccccggagttatccggtgttgtattatcagacataattgcagaccccgagaatgaaatgaaaatgtgttttaatcactgcattggtgtgcgtcaggtccgttcatagaccaggcgtccatcgatgtaagtccggtaaatcgtgcggtcatcaccaagcgcaatcatcacaaacagtttctccgccagcgtgcgtgagttgtcataacgcaactgctggagcggggtcgcggtcggttcaagtaccacaaaatccgcttctttgccggcggcaaagttaccgatacagttatccagtcctaatgaatgcgcgccgccgagagtggcgagataaaacgcttcaaaggcggttaaacaggttttctgcaactgcatcactttgtaagcttcactcagtgtctgcagcatattgaaggtcgttccggcaccgacatccgtaccaatcccgactttcacttttttcgccagcgcctttttcagattaaacaggccgctgccgagataaaggtttgatgtcggacaaaatgccaccgccgagccggtatcgtgcaggcagtcccactcttcttcctcaaggtggatacagtgcgcaaatacgctgcgttcgccggtcagtccgtagtggtgatagacatccaggtagtttttactgtccggatagagctcttttacccactcaatttctgctttgttttcatcaaggtgagtgtgaacccaggtgtccggatactcttcgcgcagccgctgacacaccgccagttgttccgggctggaggtcggtgcaaaacgcggggtgatggcatagagcagacgccctttcttatgccagcgttcgatcagtgccttacactcttcgtagctgctttccggtgtgtcggtgaggtagtccggcgcgtttctgtccatcatcactttaccggtgatgaggcgcatattgagctggcttgccgcatcaaacagggcattgaccgattccgggtgaacagtactgaagaccagtgcggtcgtggtgccgttacgcagcagttgtttgataaaaaacgctgacatttcacgggcgtaatcaatatcctgatacagcttttcggtcgggaacacatggcggttgagccattcgagtaactgctcgccgtgagcaccgatcatctcgctctgcggatagtgaacgtgggtatcaataaagcccggcaccaccagtttcccggtgtaatcacggacacggacggtttccgggatcagatgcttcccgtcttcccactgtccgaaccactctatttttccgtgccggattagcatcaggccgtcatcaatcaggcggactgcatcgggcagatcgtccatcgaggtcactacgcgggtgatatccaggaacttcccgcgtaccgctttgacggtatgttcagacgacatagctgactcctctgcttacaaaaagccctcaccggaaccggcgagggcagggttgatttaattatattttgctcaggccgcgcagaattttttccggcgtgaagtgccattcacgcagccagacaccgcaggcatcatgaattgcggtggcgatagccggtgctgcaccgttaaccgcgatttccgagatggatttcgcaccatacgggccgacctggtcatcactcggcaccaggaacgcgcggaaatcacgcggaatatcgccgatcttcggtgcgccgtaggttttcaggtcgcgggtcagcggcacacctttggcgtcgtagcggatctcttctgacatactgtggccgatggcacgcatggaggcaccgtaaatctgacctaaggccagatccgggttcaccggcgtaccgcagtcgagcagtgcgtagaatttatccaggcggatttcaccggtacgggtgttcacggccacttcggcaaagtttgccccgtacgggaaggcaaagtccggtgtgatataactggcgtttgccaccagcacaccaaacccggtaccgccttcggctgcatgcgccagatccgcgaatgtgatttcgcctttcttaccgcgcaccacacccggtgccgccagggtgacatcctccaccggctcgccgatttgcgcggcaccgtggaacaggatttttttacgcagattctctgccgccattttcgccgcattaccggagaagcaggtgccggaggaggcataagctcctttgtcgaacagcgcgtggtcagtatcccctgagataacatggacatcatccgggcagcagcacagcacttcggcggtcagttttttgaccacggtatcgagtccggtaccgatatccgcaccaccggagtggacgataaaggtgccgtcagattccagtttgaccatacagtttgcctggtcgatatccgggatccctgatttctgcatgatgatggccacgccgcgtccggttttccagtcgccgtcctgtttgcgcggggaatcccagttgataagttcgcggccttttttcaggatcgggccgagggcgcagctggcggcagtcggtaccgaggtcggcattttaccttccccgatagcaccgaggatcttcagttcctgaccttcatgcacgcggttggtttcaatcagatccagcaggtcgatattcagttctttcgccagttcggccaggatcatggtcagggcgaagttacctttcggtgccccgtaaccctgatatgcaccggtcgggcagatgttggagtagtaagtggtcacctgaaaatcgacgttatcacacggatagagcggcagtgacagcgccggaccgttactcggtaccgtcagtgagtggttaccgtaagggccggtgttcgccaggaattccatattgatggcggtgattttcccgtcttttttcgcgcccagtttgatcttcacttttgccacatggcggctggtgttcgcgataaactcttcttcacgggtgtagcggaatgagaccggacggccggtgacatacgttgcccacgcgcagacttcttccagcaggatatcctgcttggaaccaaagccgccgccgacacgctctttaatcacatgcactttgttttgtttcaggccgagaatacgcgccacctggcggcgtaagtgccacggtacctgagtggaggcgtggatcaccagacggtcgccgttcatgtaggtgtagcagatatgcggttcggtcgggcactgctgaacctggcgggattcataggtgcgctcgataacggtatccgcttcggcaaagcctttatccagatccccgatatggccgtgaacacccgcagcaatgtttttgcacggttttgcgccgatcgggaagttaatctgtaaatgctcgccgcgatctgccgcgtttttattctgctctgccaggtcggccggcgcgccgttaacataaatcaccggctcatcatgcaccagcggtgcgccgtcagctttggcttcatcgatagacagaaccggtttcagcacgtcatattcgacttcgattaacgataatgctttcagtgcgatagcttcgttttctgccaccacagcggccacgcggtcaccgacgtgacggagttttttaccgaacatgcggcggtcaagcggagacggctccggcgcactctgtccgccgggggtgtaatacacatccggacagtttttgtgggtgataacatgcaccacgcccggcagggcttccgctttactgacatccaggcgggtgatcagcgcgtgagcgtgcgggctgcgcagcattttaatgacacaggtattggcaggaatgcggtcttccacatagcacggttttgcctgcaccattacggcagcatcggttttcggcgtgactttcccgacaacggtcaggtcatcacggaaggccggtgcattgtcagctttgtagtgcggatctttgcggcgttttaccagcagatcaatgacttcatagaattgctgataaccagcgtcacggctgaacagtccggaaagggcatcatcaatctggtcgcgatccggctccggaatacgtttgataagatcagtcaggatcagggcagccgccgggtcgttataaccggactggatcacacccacatccaccatcgcctgctgaacatcactcagttcattccatttgccgagagattcggcggtttcaatcactgcgccttccagctgggcggcgatcagcagtgaggcgttgacaatacggccgttgaacaaaatggcgtcagagcctgcgaagccatagccgtcatcactgttacgcacagagtgcatacccaggctgaacagaatgttacggacgttttcgcccggaatgcaatcgggtgaatgcggggtgccgttaagtataaaatggacgttcatttcttattcctcccccatttgccggcagtctgtcagcaggtctgaaactaaaattccggtgatatagcgtttatattcttcgctgcccagtaaatccgctttcggattcacggcctgactgacggctttctccagcgcttccccgctgagatttttcgcctcaacctgcggcagacggctgataccgcaaccgacaccgtcaacggcgatccgctgctcattattaccggtcagtgcgacagcggcagtgaccacagcccagccgtcagcggtttcgcggacagtacgggtggcacagcggcggaacggatcctgtaaaatcagatgggtgatcaggcggtcatccggtgcggcgagatagctttccagcgggatcacatcattgctggccagctgaacctgagcatccagtaccagcagcaccggcagcagcgcatgttcgcgctgacaggcggcgatctccccgccgatggtggcctggttacggatatggcgtgaatagacaaaaccgagcgcgtcatacagcgcacgcgggatcagcgggctttcacgcagcgtttccagcgtgacaaccgcgccgatgcgcagaataccgtcctgccactcgatggacttcagcggcagcagtgacagtgagatagcgacagtgcggtcagttttggtcggtaccgcattcagtttactgccgcctgcaaaccagacagcgttttcctgaaagcgttgtttcagctcagttgcctgcgttaaggtggcagggcggaaaaattgttcgatcatgggttacccctacattgctcttccggcctgcggcagtgccgcaggccatggttttttattacagtgcgtccatccgggcccacatctttttcgcggctttgcgtgcttctgcaaagagcggttcgatatcgaatgggaactgacggttttcatacaccatcacaccatccaccatcacgctgttcacactgttggatcctaaaccgaaggccagatggcccggcaggttatccccgacaaacggtgttggtggtgtgtaatcacaaatggtcaggtcagcctgatacccggtttccacgcggccgaattgtttgccgaagttgcgtgccagtaagcggttaccattccacaggaagcgggtgaagctgtccggccacatagcgccgcctgcatcgcggtgtttgaagaaggcaaacttcatttcttctaacatatcggagccgataccgtctgtgccgagtaccacgttgttgtagtcacccaggcggtggttgtagccgacatggttgttcatattggagcgggcgttgtggaccaggaagccatcttttttattcagcagctcaatatctgcggaagaaagatacaggccgtgggcgatcagggttttttcatcaatcagatcaaactcacccaggcggatcagcaggtccttgccgtatttgtcatggctgaaagagacgtcataactgtcttccgccgcatggatatgcaggccgcgtccggttttcttaatcgcctcgcgcagcattttcagaccttcatccgccacggtgaacggcgcgtgtgccccgatgtgcgcttccaccagatagcgggatttaccgcttttgcgttcgctgtcgataagctccgcaaaggcgatattctcttccaccccggcttccagctctttcaggccgccgttgcggtcggtggtttcgtagcaggtcatgccgcgcagaccggctttcaggaagccgtcgcgcagggttttcagggaaccggcgatatagtttggtgaggcatggtggtcaatcaccgaggtacagccgctcttaatcgcttcgagagagcagataaggccgctgtaataaagggattcctcatccagcgcgcggtcgagccgccaccacaggtttttcagggtggagatgaaatcagggctcggcgcgatattcgccataatgccgcgtgacaggccggaatagaaatggttatgggaacagacgatccccggcatcaccagtttgccgttcatttctttgacttccgcgcccgggtaacgggaatgaagcccgttacccacagccgcaattttgtcaccctctatggcgatatcgaccccttcgcggatccccgccggttcgaactcagtgatggtggcatttttcagaatcagcataattatttctccacccggcctaacagataacgatagtgtttatggacatggctcatgatgcggcacatctcttccagctcctgaggaacctgactgaattccccgtcagcacccagctgtaatttgctgactttgccgtccaggcggacagtaaaggtgctgccgtcagccaggaagcccgggttggtgctgttttcgaagtcttccggcaggctgaagatagtgactttgtctttgtacggcttgccctgccacgggcagaactgggcacagttgccgcattcgttacacatcgcatccaggtgcagggtctgataacggttacggaagcccggaatcgccactgaaatgttggcgcggttcgggcacacatcgacacatttcgcacagatgtaattacattccaggcagcgctgagcttcctgtttcacgaacgcctcgcggtcgttgctgtccaccatctgcacggcgatagcgcctttgcggtcagtgatatcctgcggatccacattgagccagtatttgtcgctgtagtgagagaggatattttcgcgctccagaatggcatccgtcgcacgacccgcatcaccgatagccgccacgatagaggacgggccgctctgcacatcaccaatcaggaacacattggcgcgggtggtttcaccgctgttgcggtacaccgccggccagccgtcttcacccatcggcacgccgatttgtgacagcacttcgcagtcctgctgttcgccgatagcggtgatcacgctgtcgattttcagggagacagtctcttctgtcgccaccggacggcggcggcctgactcatccggctcacccagtttcatggtgcggaccagcagggtgccgtcagcattgaactgctccggattgtgcaggaacatgaatttcacatcatcttcaaccgcttcttcatactcttccggccaggctggcatttctgcctgagaacggcggtaaataaccgtcacatcttccacaccggcaatccgtttggcggcgcgggcgcagtccatcgcggtgttaccggcaccgataacggcaacatgtttgcccattttcagcggcgcattgttgttgtaatcatgcaggaacggcagggatttatagacgttgcggttgtcaccggcgagtttcacgccgctgtttttgtctgtccctatcgcgaccagcacataggtgaaaccctgctccagcagtttatcgacggtcagacgcgggtcacagccgtattcaaatttcacgccgtggtcagcgacgaactgaatatcgtgctcaatagtttcacgcgggatacggaagtgcgggatgatattcgccaccacaccaccggcattcgcttctttctcaaataccgtcaccggatgaccggcacgggcgaggaaatacccggcagccagaccggcagggccggcaccaatcaccgcgaccgggtttttatcaccggaaccggccggtttgtgccagcgggctttgtactctttccagcctttttccaccgccacttttttcagttcgcggatattcagcgcactttcgtaatccaggcgggtacagttgtactggcactggtgatcacagatatgaccggtgatggcaggcagggcgttacgctggtaaatcagttccagtgcatccgcatagcggccttcgcccagcaggcggatatattcaggaatgtcctgtttgatggcacaggcagtcacacacggtgcgacataacagtcggtcagcggcagcgggccaccggcgtcgatttcctggtctgatttccagtgtttctgggtatattccatgctgacggcacgttctgccagcgcattcagtttacccacatcaatctgcgtcatgccccacgcatcggacttatccagctcacgcaggcactcggtctggcgcatataaccacccggtttcagcaggtcagtcgccatggtgatagggcggataccggattcaaaaatatcgcggatattgaacttactggcaccgccggagtaagaaatcggcagtttgccgtcaaaatgacgggagagcagcgcggcaacgttgatggagagcgggaacagggctcggcctgacatatacatctcgccgcccggcagacgccctttgttattgatggtgccgagggtgttggtcagcttgaccccgaaaccgcgatccacttccttcgccagatccatcaggcgctgtaacatttccagggcgcgatccagtttcaggtcatgagagaacgattcctcactcagcccgatgtaatcaaagccgcaggtgtcgaggatttcacggacacgcgggaagccgagcagtgtcgggttcagcttcacataggtattgatgtgcttttcttccagcatgtagcggcagatagcctcaatctcatccggcgggcagccgtgcatggtggagagggtcacacctttggataaatcccccggcacgcggtcagtcatggccagcagatcggctttgcgatcttccagacccagctctttcaggaagcccggacgggaaataaaggctttcatctcctcgcggtatttcgcgaagaccggcagctgtgaggaatccaacatggcgtggatatactgctgcatgcgcggttgtttaatcccttccaggttataaccgacactcatattaaagatgaaggatttcgcctcgcctttggtgcgcgggtcaaaaatcgcttctaataaatgaagggcaaaccaggctttgaggtattcgtcgtgggctttcggcagggtaaattcggtggaccattcggtgttgaaacattcgtcctgagcatcgatacacggcttttcgagctcaagttcatcgaggatctgaacggttttcacctcgataaaacggccgccggtcagccaggaaaccacaatattctgagcaagctgagtatggggaccggccgccgggccgatcggcgtctcgcaggtttcaccgaagacagacatcagaggatgctgatgttctctgcggtaaaactgccgttcattgataccaaaaatggaacggctcgccttatattcttcaaagatccggttcagaagttcgccgaacgggacgggacgcattatatctcccataaaactctccttgctgcaatatgagggggcatgccggtggtgccggacatgcaactgtatgcactcacagttgcaacaattacgccaggattgtttaaggctgcggatttcgtattcagagaaataaaaaaatgtgagacaaatctaatcttaatgtcaaagtgtgaaacagctcgcacagcgctaaatgagaatatgaatcaataaaaaagatctttattaccatgggattaacatgtgaatgagattctcaaaaaaagaaaaaatgtatcacattgataatgggaaaaccgcgttaacaattaatgttattaatgagacggaagtaatagtgtacagccggattacccgcgataatgctgctgataagcctccggtgtatcgatgtcggtaataacctcatcgctctgcatattcaggaaggtgtgaggaccggccagcagccgttttttcatggtattgcccgccggttgtgatagtgcggcgagcagacatgcgcgggagagcagcacggggtggcccggaacttgcttgtaacagggaaggagtgcggcatcaccgcgctgtgcccacagggtctgccagatagccggggtgagaaacggtacatcaccgtgggtaagaaaacagtattcgctggtcaccgcctgtgcggccaggtgctgcgaggagagcagcccggtttcatagtccggattatgcagaatctgaatacgttttacggactgataacgcgcagccagttccgcgccgcgaaagccggtcaccagcagaacccggtgacaaaagcgcagtgcattcgacagactggtatccagcagagtggcaccgccgctgccccatggcagcatcattttccactcacccatccgtgaggagagcccggccgccgtcattatgcagtccgtttcctgcgggcaaagcggctcccggactgataaataagataaagcggtatcggctgaggtcgggtgagacggcataatgggtataaactccgctgataaatattgaaagtgactgatattcaaaggattcggtaatgacgatgacaacggccctcaatacacagatccctgtccgaagttgcgccactatacctgaaccgctgcgccggttatgtgatacacatccgggcggccatgcaatggtgatcagtattgtcggggcaggcggcaaaaccagctgcctgttctggctggcacaggctttttctcaattagggaaaaaggtgatgatcaccaccaccacccatatgtttctgccccgcgaagggttcccggtcattctcgcctgtcacccggtccgcctgcctgatgcggtcacaaacagaggctcatttgcctgttataccggctggaacccgctgaataacaaggttcgcggcttttcctccgccgatattaacgccctggcggaacaaaatgccgttgatgttattttagccgaagctgacggagctcgcggttttggcataaaagcgccggctgagcatgaaccttgcatacctgattacagtgattgtgttattgctgtgacggatggccggcttctgggggctcccgtcgggcctgacaatgttcaccggtggtcacatttctctgccgttaccggcttaaacagcggtgatacgctggatttgggggcgataagccgcctgatccggcatccgcaggggatgtggaaatcagcaccaccggacgcattacggatctggctgataaaccgcttttctcaaaatgagaatttttcgccggatatactggcagactggctccgcggcacaccgctgaacgcagtatggttcggtgccgtcagggaagatcccgcaattacacacatattgcagcgacaataatatcaatgataaatgcagggatatccattgaggtctgtttatgaaaatttttaccgaagcagcgaagttggttgagaaaaattgcccgtttgccatggcggaaattattgaatgttcaggcagcactccccgtcacagcgcacaaatgctggtgctgggggacggaaaaactatcggtaccatcggcggtggtatggtggagcgcaaagtgattgaagaggcggtggaagcgctgcacgaagggcgttcccgcatgttccacggccggatggcccgcaacgggcagcatgctgtcggctctgactgcggcggtgcgatgtcggtgtatatcgcggtacacggtgtgcgcccgcgtctgatccttctcggcggtggtcacgtcaaccgtgctattgcacagctggcggctttcctgaatatcgatattcatgtggcggatgtgtatgccggcagccttgagccggatctgttcccgccgtcaacccgcctgtggcacgcgccttcatttaccgatgcggtgaaccagctggatccgcagccggaagattatgtgattatcgccaccaacagccaggatctggaatccctcaactgccttatcgacaagccgttaaaatacctcgggttactcggcagccgccgcaaagtacagacattcactaaacaattaagcgaatccggggtatctgatgcacagctctcccggcttcatgcgccggttggctatgatatcggtgcagaaacgccccatgaaatcgcggtcagtattctggctgagctgttacaggttatgaatgatgcaccgggcggggcaatgaaacagaacccggcagaagcccgcagagcaaaacgcgtggtgatccgcggcgcgggtgacctggcaaccggcgtggcattacgcctgtatcacagcggttttgaagtggtgatgctggatgtctgcaaaccgaccgtgatccgctgtacggtctctttcgcccaggcgctctatgacggcgaaagctgtgtggaaggcgtctgtgcccgttatgctcatgatattgatgaagtaaaccgctacctgaaagaaggcgctatcccggtgctggcggacgaacacggcgaactgttaccggcgctgcacccggatgtggtggtggatgccattatcgccaaacgcaatgttgccggtacccaccgcaagatggctccctgcaccattgccctcggaccgggctttgaggccggtgtggactgtgatgcggtgattgaaactcagcgcggtcatcacctcggacgggtgatcacccacggcagcgcggcaccgaataccggtattccgggcaatatcaacggcaaaaccaccgaacgcgtgttacgcgcaccgcacagcggcatgatgacgcgccatgtgaatatcggcgacctggtacacgagggggatgtgattgcccgtatcggtgacacagaaattctctcgccgatggacggcatggtacgcggcctgctcaatgaagggctgtgtgtgccggaagggtttaaaatcgctgacgttgacccgcgcggtgcactggcggacttccgttcggtttctgacaaagcccgcgcgatcggcggcggcgtgctggaggccatcatgacacggctgaataaaatggacagcgccccgaagtgctgatcacggattttccgggtacggcaccgtacccggattattcaggcacggaacagcatcccggccacttcccggatcaactgtaaattgaggatcaccagtgccacagtggaaacagtcccgagtatgatcgtcagctgcgagttcacaaacacccccatgatttttttgctcgaggtcatcagcagcagcgggatcatggagaacggcagggcgatactcagaaacacctgggtataaatcagcagactttccaccacatcctcgcgatccccccacaggtaaatacagataatcaccgggatcacggccagaccacgggtgatcacccggcgcagccacatcggcagccgcagatgaataaagccttccatcacaatctgcccggtcagtgtaccggtgattgtggcgttctgcccggaggcgagcagcgccaccgcgaacagtgtggagagcgtggcactggcgataccgccgacgatacccggattctgcagcgcgtcatacagctgggtgaaacgtccgaggtcagacggatcgttaccgaaaaacagcgctgcaccgagcaccagcagcagacagttgataataaatgaaaacccgagctggatattggaatcaattgttgcaaagcggatcgcctcgcgcagcccggcctcactgcggcggtcatactgacggctctgcacaatagaagagtgaagatagaggttatgcggcatcaccgttgccccgacaatccccagcccgatcagcagggcggaatcctgcccggccagtgtggcggtgaagattttctccgacggaataaagccgcgcaatactgcactcatgtccgggtccgacagcatcacctcgtaggcaaaaatcaggaaaatcgttaagatcaggacaaacacaaaggcttcaattttgcggaaaccgagtttcatcagcaccagcagcagaaatacatccagtactgtcagcagcacaccggccatcagcggaatgccgaacagcaggttcagtgccaccgcactgccgatcacctccgcaatctcggtcgccataatcgccagttccgtggtgatccacaacagcgccgccagcttcggcccgacccgtgcccgggtagcctgtgccagatcctggccggtgacgatcccgagttttgcgcacattgcctgtaacagcatcgcaatcaggctggacagcaaaatcaccgacagcagcagataactgtacagcgccccgccctgaatcgaggtgatccagtttccgggatccatatatcccaccgccaccagtgcacccgggccggaaaaggcaaacagcttgcgcagaaaaccggattttgccccggcaaccggcacggtattattgatttcagccagactgagttgcggtgtattcagcatgataaatccgtccgtgatcgtaatgagaactattatcactatattccttatcgcgatgcgggattatcacaattgtgcgatcgtagtaccggcggatttcggatgataccgggtacaggacttctctatacgccggattccctgaaaatgcatgcacaggctgcgattaaccgcgattttcaggtgggggatatatcagatctcaccatcagcaatattaaagaaaatccgccgtccgttaccggtaagcggaatattgattttacggtatcctctgccgcatcaggccgggtttatcactgtatccgctctgattattctgtccgccgcttcggcacccgtgatctgaatccggaatcaccggggcatatggtctgtgagccgcaggaaaaatcctgaatttcccgccggaaataaccggtaacagcctgatatcacctgtaatcaaacacacatattttacctgtgtcagactctattgctgatattttgatgtatgctgtgagatatgatggaaaaattatctgaattatatgattttattaccgcgagcgccgttttatcagcggtgattctggtggttattctgctggtcacctggtttctcgggcggcttatatttctgcgcgtggcaaaacgtttgttgtcgttatttactaacctgactgacgacagcatgatccacagtattgccaagaaaagtgcctctgtcgtggctgtcacgctggtgctgtacattaataaaatgctgccgaccttttcggcagaaatgaatattctgtttaataccgtatgcagcgcattcctgattattaatctggcttcactggttaatgacgggctggatatatttatcctgcgccataccgggcgttcatcgtaccgtaacagctcgataaaggggtatattgaaattgccaaaatcggggtgtggattgtttcctttatcctgattattgcgttaatgacctcgcagtcgccgctgattattatttccggtttcggtgccgttgcagctgttctgatgtttgtctttcagcacaccttattatcctttgtggccaatattctggtctccaacggtaaggtgctgaaactgtatgactggatagaattgcccggcagtaatatcagcggtgaagtgattgatattgcgctgcataccattactgtccgcaactgggataatacgatctcaaggatcccgacaaaagatttcctgaccgaaaaatacactaactggcagccgatgttctcttccggcggccgccgtattaaacgcagtttttatattgatcagtcctcagtatcgtttgctgatgaaacgttattagcggagctgcggaatcaggaatcgtttcgtcagtcactggatgaaatactggcggaaaataccggttatgatgacgtaaaagagtggatggctgcaaaaggggtcactaatttacagctgttccgcaaatatcttcttaactggatcaaaatgcgcggtgatgtgcgggcggatatgtatctggtgatcagaaccatgtcgccgacaccggagggattgccggttgaaatatactgttttacccgctccaccacctgggttgattatgaggaaactcagtcgcagatatttgaatatgtgaatgcgtcggcaaaatatttccggctggatatttaccagcaaccgtccggtcatgatctggcgaatttgcgttaccgggccggacgataatggttttcgtttttttcgttatcagcaactccccggtgctgatgtaagctgcacctcaaacccccgaatcagactctccgggctgtgcagaaaggcctgttcaccatcatcactgtccataatctgcagcgcttcccgcaataacggcggcaggttttcgtccggtgccaccggcgcggtcgcggcttccgtggtggcggccacctgctgaccggcgctatacaggcagcgctgttgtgcggtatggtggacggcattcgtgcttatcgcctgccatgataagcctcagacacagaggaaccgttatgaaatcacgcgcagcagtcgccttcgggccgggtttaccccttgaaattgttgaaattgatgtggcaccgccgaagaaaggtgaagtgctggtgaaaatcagtcacaccggggtatgccataccgatgcctacacgctttccggtgatgatccggaaggtctgttcccggtggtgctcggccatgaaggtgccggggtggtggttgaggtcggtgagggcgtgaccagtgtgaaaccgggcgaccatgtgatcccgctgtacaccgccgagtgcggtgagtgtgatttctgtacctccggtaaaaccaacctctgtgttgccgtccgcgaaacccagggcaaaggcgtgatgccggacggcaccagccgtttctcgtataacggtcagccgctctatcactatatgggctgctcaacattcagcgaatataccgttgtggcggaagtatcactggcgaaaatcaatccgcaggccaatgcggagcaggtttgtctgctcggctgcggcgtgaccaccgggatcggcgcggtacacaataccgcgaaggtacaggaaggggattctgtggcggtattcggcctcggcggtatcgggctggctgtggtgcagggcgcacgtcaggcaaaagcgggccgcatctttgctatcgataccaatccgtccaagtttgagctggcaaaacagttcggcgccacagactgcattaatcccaatgattatgacaaacctattcagcaggtgctggtcgaaatgaccaaatggggtgtggatcatacctttgaatgtatcggcaatgtcaatgtgatgcggtcggcgctggaaagtgcgcaccgtggctggggacagtcagtgattatcggggtggcgggtgccggaaaagagatttcaacccgtccgttccagctggtgaccggccgggtctggaaaggtacggcgttcggcggcgtgaaagggcgtactcagttgccgggaatggtggaagatgccatgagcggcaaaatcgagctggcaccgtttgtcacgcacaccatggaactggataaaatcaatgaagcttttgatctgatgcacgacggtaaatccatccgcaccgtcattcattactgataacgtattcagggagataatatggaacggattgaacatcacgcctgtttcggcggcagccaggaagtctggcgtcaccattctgcggtgaccggtacgccgatgaccttttccgtgtttctgccgccgcaggcaaaaacagagaaatgtccggtgttgtactggctttccgggctgacctgcaacgagcagaattttatcaccaaagccggggcgcagcgttatgcagcggagctcggtctggtgattgtcgcgccggataccagtccgcgcggcagtcaggtggcggatgataaagagtacgatcttggccagggcgccgggttttatgtcaatgccacacaggagccgtggaaagcgcattatcagatgtatgattatattctgaatgagctgcacaccctggtaagcggacatttcggcacatcggaaaaacgcggtatctgcgggcactcgatgggcgggcacggcgcactgatgctggcgctgcgtaatccggatgcatttctcagcgtgtcggcatttgcgccgattgtgtcaccgtcacaggtgccgtggggcgaaaaagcgttttctgcctatctgggagaggataaagcggcgtgggaacagtatgatgcggtgaaactgattgaatccggccaccgggtgacggatatgctggttgatcaggggcttgccgataccttcttcagtaagcagctgaaaaccgggttactgaaatccgcctgcgaaacacacaatatcccgcacaccatccgtgtgcatgccggttatgatcacagctattacttcattgcgagttttatcgcggatcatatcgcgtggcatgcagcacgtcttaacgcataaacccggtcagccgggttttttctgcgacaggtatttgatcggtacatgcggcgtcagccagacgccgttatccgccagatagaacggataaccggttttatgcatctccccggcggcaatggtgagtaccaccggtttgccgtgacgggcaccgacagtcagtgcggtatcttcatccgcgctgaggtgcacatagtgccgtgatccggcaattaatcccagttcacagatatcactgataaaccggatagcggtaccgtgatacagaatatccggcggtgtctgcggcgggtaatcgatcgccacctgtccggcagaatgcccctgtgccgcacggatatacatgccgtcggatgagatcgtaaaccgctttttgtcattggtttccaccaccttttccagcgtttcacggtcaaacggtgtgccgtgagcagcggcctgacgcaggagcacggtgatatctgtccagccttcattgtcgaggcggatcccgatggagtccggctggtgccgcaggacataactcagaaatttactgattttatcgtattgattcattttctttttacggttttcgccggcgatccggcagtgacataatggctgaattatacgcgcctgttgcggtaaaggggaggaatgacagcgataactatgcgctgcatcaggctctgacggcggaataaccgccgtcagaacagatgttaaatggtactgagctcgcggttacgggtttccgcgccaaggaaaatgacggagagaatggcgataaccaccgcggcactgaagatcaggaaaatcgtgctgacagcaaattgatactgaatcaggtaaccggccagaagagggccgaggatcccgcctatccgaccgattgcggtggcggtaccggcaccggtggcgcggacactgtccggatactgctccggcgtgtaggcgtagagcgcgccccaggcgccgagattaaagaatgagagcagcatgcccgaaatgaccagtgccgtggcggtttccgcgcaactgaacccgtaagcactgattgctgttccggcgagataggtgaccagcacgaatttgcggccgtaacgctcgataagccaggcggcactgaaatagccgggcaactgggcgagtgtcatgatcagcacatactgaaagctttttatcagactgaatcccttgaggatcgccacgcccggcagccagagaaaaatgccgtaataggaaaacacgacacagaaccacaggatccacagcatcagggtggcacggcggtactgcggcgaccagatcagtgccatcgattgcgcaatggtgagtttcgggcgctcctgcgcggtatagcgggataccggctccggcagctttgcccgcagccagagggcatacagcgcaggcagggcgctgagcagcatcgccgtgcgccagccgtaatcagggataacataataggcaatcagtgccgcaatcagccagcccacggcccagaagctctccagcagcacaaccacacggccgcgttcgtgaggggctacgctctcactgaccagcgtggaggctaccggcagctccccgcccagtcccatcccgatgaaaaagcgcagcaccagcaccacggccagcgaaccggcgacagcagtcagcccggatcccagactgaacagcagcagagtgataataaacaccggtttgcgccctttccggtctgccatcagaccgaaaacaaaggcaccgactgccattccggcggcattaagactgccgatccagccgagctgtgcggcactcagcccccagtcggcctgcagggcggccagcagaaatgccagcagcccgacatccatggcgtcaaatgtccagcccatcccggctatccataacagcttgttgcgtgaagtggcaggcgctgccgtgtgtgtccggagtgtcgtcatggttgcgaccttttttatccgtcagaagaaaatgtgtttagtatactaaacaataaacgtgcaaatgttaatcataaaataccgttttaaagaagcagtaacatataaaaagcccggcaaacggcgggcagccgcgcttttagggttattccgttatcttcgttaccgcagctgttctactatggtgagttatggtgtacacagcggcctgccggtatacggtgccggaatcgtgatgataataatcagggagttaagtaatgacattaacctttggcgttaaaagtaccctgctgatcgccggtatggcggtaacagccgcggcggcgggcaaaccgaatgtaattgttcaggatgtaaaacttaacaaagccacgattttcctgcgcggggcagagctgagtaacagcgcaacactgaatctgcctgccggtgacagtgatgtgatcctgactaatgtggccggaaatattaatcccggcagcttatccgttatgctgaataatgatgatgtcatcattcagtccgtcaatctgcgcagcgaaattgaaaagccggtgtattcagacgaaatcaatgctatgaaggcgcagattgaggagcaggatctggcgattcagcagctgaatatgcagacggaagtgaataacgagcagctgggtctgctgcgtgatcaggatttcttcggcaccggcggggcgccgctgacacaggagcaatccgtgcagaagctggattttatccgcactcagatggcaaaaatctatgcggaacagctggaatattcccggcaaatcaaagaaaaaaccgaagcactgacactgctgaaagcgcagtatgaagagaaagtcacacagtttaaggagcgccgcacacagctggtgctgaatgtgtccacgaaaaaagcggtgacagcggaactggatatcgactatatcacgccggatgcggcctgggcgccgtcctatgatatccgcagcgccggtatggataagccggtgacgctgacctacaaagcggatgtgatccagaacaccggtattgactgggatcaggtggatctggtgctgtcatccgccgacccggtacagagtattgccccgccgcaactttatccgcagtatctgtcactgatcaatgagtatgcggtgatgggtgaaatggcgcctgccccggtggctatgatggcggaggacaagaaggagtacagccgcaaccgctcagcgaaacaagcccctgccggcgggatctcgtcgtttgttaccgcagagagtaacggtatcagcctgacataccgcattgataaaccgtactccctgccgtccgttgcggagtcgcgctcactgacgatcaaacagacggcgctggacggaaaataccgttatatcacacggcctaagatggacgaacatgtgtatttacaggcggttgtggaaaacgcaccggcgctgaatctgctcagcggtaaggcgaatatctattttgataaccgttatatcgggcagacttatatcgattccggcctgataactaatgagctggaactgccgttcggcatgaataaagatattcaggtcagccgtaaggtggacagtaaactgacaaaacagccgggtattctgggctctgcggttgaacagagcgaaggttatatgattaccctgtcatctttcgccaaagcgccgctggtggtaacggtgtttgatcagatcccggtcagtcaggataccaatatcctggtgaaagatgttaaaaccggagaagggaccgttaataaacagaccggtgaagtggaatggaaagtggagctgaagccgcagcaggtaatggaactgccgctgagttacacactgaaatatccgaaagaaaaaccaatcagtggtttataattattgcagcagaaaaacggccgggaaacccggccgttatattaacaaaaggaagattaatcgccgataatagtaccggttttaccctcaataccgtctttggctttattcagcagagtaatcagtgccttgcggccttttttactgcggctgaaggagagcgcggcttccactttcggtaacatggagcccggtgcaaaatgtttctcatcgatataacgctgtgcatccgcagatgtcagtttatccagccactgctcgtttggtttgccgaagttgatggcaattttttccacggcggtcaggataatcagcatatccgcatcgatcatctctgccagtttggcgctcgcccagtctttgtcgataaccgcattggccccgcgcagggtgttgccgtcgcggatcaccggaataccgccgccgccgacagtgatcaccagctgatcagcatccagcatggctttgacggtttctttttcaataatatcaaccggtttcggtgatgagaccacgcggcggtaaccacggcccgcatcttcgcgcatctcaaaccctttcctgctcagggcttccgcttcttctttgctgtagaacgcgccgataggtttggccgggtttttaaatgacggatccgccgcatccacttctacctgtgtcacgatagtggcaaccggcttattgataccccggttcagcagctcttcacgcagtgcgttctgcaaatcgtaaccgatatatccctggctcagtgccacacagactgacatcggcagaaccggtgatttggcttcggttttgctggcagcttcaaatgcgccggttatcatccccacctgcgggccgttgccgtgtgtgaccacaacgcggtatccctgagcaatcaggtcggcaatcacgacagaggtggttttgacggcagccatctgtcccggaagatcatttcccagtgcgttgccgcccagtgctaatacgattgtttttttcatccttttttacccgtaatgaattagttgaaacgataatcggaaaaaattaataacaccggtgcggagccttaaacggacggcgtttcaggaaacggccgcggccgggttcagcagtaaattcgccgtcacggtaaacaatatcaccgcgcgacagtgtgcagcagactgcgccctgtaccgtcatgccttcgtacgggctgtagtccgcgttatcatgcagatccgcatggcggatagtggtttcctgcgccgggtcgataatggtgatatcaccgtctgcgcccgggcggatcacgcctttctccggccagataccaaacagttttgccggcattgcactggtcagggaaacaaagtgttccggtgaaatccgtccctgcatcacgcctgcagaaaacagcagtaacatacggttctcaacacccggcaggccgttcggacagcgggtgaaattcccgccggacagcgccagacgctgctgatacgggaaggtgcagtgatcggtggcgaccacatcaatcgcgccgtcatcaatacccagccacagggcatcggcttcccggcggttacgcagcggcgggctgagaataaatttcaggccgtcatcgcgctcataacagcgttcatcaaggaacagatactgcggacaggtttctatccagaccggctggtggcgggctttcgccatcttcaggtaatcgagacccaatccgttggaaaggtggacgatatagagcggcgcattgccgcagatatgcgccagattaatcatcctgccgattgcttccgcctcacattctgccggacggctcagggcatggaaaatcggtgaggtttgtcctttcttcacaaactccgctttgcgctgtgctatcaccgcatcattttccggatgcacggtggtcagcgccccggcgtggttaagctgttgcagggcacgtaaaatatccggatcatcgagcttgtactgataagtcagatagagtttgaagctgctgatcccgtccgccaccatcagcggaatttcatttaaaatatcgtcgttgatatgctggatcacgccgtgaaaactgtaatcgataacggcgcgtcctttggcgtagcggtgataattctcaagctggtggtgcagtgaacaacccgccggaccaaatcccatatgatcgataatggtggtggtaccgccgcaggctgccgcacgcgtgccggtgtaaaaatcatcacagctgcgggcaaggccgacatcaatattaaaatgggtatgaacatcaataccgcccggaaaaacataacatccctgtgcatcaataacgcggtcatctgtctccggtgcaatatccggtgcaacctgtgagatcaggccgttttcaatcagaacatcctgccggtattgtccgtccgcattgacaacggtgccgttgataatcagtgtgcgcatagggggtactcctgaaaaagccccgcacatcagtacggggccggtaagacaagattattttttcatttcagccatgtagcttaacggaatggccgcgtacatcgccgcacaggtcaccaggtgatctttccaggttttttcgtttggtgcgtgagcttcaggctctttgcccggaccaaaaccgataaccggaatgccgtgacgacccatgatagaaacaccgttggtggagaaagtccacttatcaacaaccggctctttgttgaacaggccgcggtaagcgcgatccagtgtcttcacggtgaagtgatcttcttccactttccaggtcgggaagtagcactctgtcggatagaccagaccggtccaggaggcacgctcataggtgtacatagagaccacgcctttcgctgctttgacagccggtaatgcgcggatttcttccagtgcgccttcccaggtttcgccccaggtcaggcggcggtcgatagagactgcgcagctgtcagcaacagcacagcggcttggtgaggtgtagaaaatttcagaaacagtcagtgtgccctggccgaggaaatcgtcagtggccagacgttttgacagctcctgcagttcacccagaatcggacccattttgaagattgcgttgtcaccgcgctccggtgcggagccgtggcagctgatccccggaacatcaatgcggatttccatacggccgcgctggccgcggtaaatctggcagtcagtcggttcggtactgaccacgaattccggtctgattttgtcctgctcgatgatgtactgccagcacagaccatcacagtcttcttcctgaacagtcccggtcaccagcagggtgtactggtcttccagacctaaatctttgatgattttaccggcatagaccatagaggccatgccgccttcctggtcagaggtaccgcgtccgccgatgatttcgtcgttttccataccttcgtacgggtcgaattcccagtttttgatgttaccgatacccacggtatcgatgtgcgcatccatggcaatcaggtgcggaccgtgaccgatataacccagaatgttacccatcgggtcgatatccactttatcaaagccgactttttccatctcttctttgatacggtgaatcacgcgtttttcgtcgcagctttcgctgggaattgccaccatgtcgcgcagaaaacgggtcatatcttttttatagtgttcagcttttttgacaatttcatcaaacgggatttgcttagccatatttcaatactccaattagttaatatttctgcgccgggtttttaccttcccagacaacttcacggtaatgtttggtatctgtgtcaccttcggtgttgatcacgaggatgacggaatcactgttcaggccgagtcttgccatcagttccgcacgttccggatgatagttaaccgcagccagcacaccgagaccgaccgcgccggattcaccggaaatcacgcggctgtctttgccgtacgggttaccgaggacacgcatgccgagggcagccaccgcatcttcacaggagataaactgtgtcgcgcagttacgcatcagatcccagccgatagggttcggctcgccgcaggccagacccgccatgatggtggccatatcgccgccgacattgacgatttcgcctttcaggctggaacggtagagacagtcagccagatccggctcgacaataatggaatgcagattttttgccccgaactcatcgaccagatagcccagcacaccgccggccatcgcacccacaccggcctgtaacagcacgtgggtcggacgctgaatcttcatctctttcatctgggcaaccgcttcggcagccagtgtggtgtagccctgcataatccaggtcgggatcttggtgtatccttcgcaggcggtatcctgaaccacgatccagccgtgttttttggcattttccatggtgagacggacggtatcgtcgtagttcatatctgtgacgatacactccgccccgaggccggtaatgtgattcacacgttcctgtgcggagcctttcggcatgtacaccaccgctttctgaccgagtgcgcgtgccgcccaggccacaccgcggccgtggttaccgtcagtggtggtggcgaacgtcattttttcagtcagagtgcttttgagtttctcgaaagagaaatcgttaatatccatgttgtacttttcgcacaacaggtgggcgatagcataagagccgcccagaattttgaatgcattcagatcaaaacgctgtgactcatctttcaccaggatattacgcacgccgaacagcgcggcgagatctttcatgtcatacagtggtgtcggatggtaacccgtaattttctcatgaaacttcagcgccttatgtgcttcttcacgggaaaaaagcggggagtgtttaccgttgaaataacggttatctgaaatatctaacttcagtgagaagacagacatagagcctcacctcatatcatcgggaaaagaacccggccggtgacggccgggatccggatttataaaatacgtttacgtgcgtttttcagcagttgctcaagaaccagggcaggctgcgggaatttgcgggccagaatcatggcggagatgatatacggcttccagctggcttctttgtaagtggcgatacggtatttctcgaatacagcttcttccacttccccttccttacaggaaacaccggtgatatccgcaggcagacagtgcatgtacagcgcttcgccgtctttggtcagcttcatcatctcttcagtacaatgccagtctttatggttggcgttctgtgccaggcagcgctgctcaagggctttcaggccgtcatggtcattggcacgcagcagttcggtacgctgttccatgactttgtaaggtgcccaggatttcggatacacgatatccgcatctttgaacgcttcttccatcgatgtaacctgcttaaagctgccgccggattgtttggcgttgtttttcgccacatcaataacgtcagggatcaggtcataaccttccggatgcgccagcgtcacatccataccgtagcgggtcatcagaccgatgatgccctgcggtacagagagtggtttaccgtagcttggtgaatacgcccaggtcatggcgattttcttgcctttcaggttttccagtgaaccgaagtgctcacgtaaccaggccaggtcagccatagactgtgtcgggtggtcgatatcacactgcaggttaaccagcgcaggacgctgcggcagaacgccttcctcaaaaccttcatccagagccgcacccacttcacgcatataggcgttaccggcaccgaggtacatatcgtcacggataccgatggcatccgcacagaatgaaatcatgttggccgtttcacgtacggtttcgccgtgagcaatctgagatttaccttcgtcgaggtcctgctgggccaggccgagcatattcagtgcagaagcataagagaaacgggtacgggtggagttgtcacggaaaacagagatgccaaggccatttgtgaatacgttggttgcgatgttatcggcacgcagccctttcagtgcagctgcaatatcaagcaccatcgtcagttcatcctgactctgttcccaggtaagcaaaaaatccttttgatgaagattagatttcagtctggcgatatctttcaataattcattaacgtttttcatctttaaatcctatgtgaaatggccggtgacaattgaatatgcagtgagaagaaggcatttctgcatgtgtactgtgactattaacaataagcatgccaaatcagccggaatgatcttccgggggtgaaatgcagggcggattcgggagggtgatcacaattatcaggggctgatggccgggttatgtgtgacaaatgcgaataaaagttattttcagcaagggtgaaaagtcgccggtatcagaccggtgagagggcggaaccgccggaagcggggccagaatgataaacaccccggcggatttatcatattgataaaatagagtgacggagattccagtttcattatcaaatctgaagaaaagtgtgatttttgtacatacgttagagtttcggtgataaagatctggcaatcttgtgctatcagtgggtgataattcagcccgttgataaataactataataaaatcattaatttgtcgcgttatgaactttcttttcgatatgtcgttttaagagcataggaagtcgtaagcatgatcactgaaaaatcaccatctgtgctgatgcagatacagccgacgattgttcacttcagcaaaatgctcgccagtgtgttacagcttgatgttgaaatcgttgatgacaaactgacaaggattgccggaacagggctgtttaaccagcacctcggacatcgtctgaccaataattcccagctgctccgctatgtgctggataccaaaaaagaaaagatagtcacgcactcctgttttgatccgctctgcctcaattgcgcggataaagataactgtaaggagaaagcgtttatcggtacaccgatcatcttccaggatcgctgtatcggggttatcagcctggtggccgtcacctctgaacagcaggagcggatccgggataacatccatgacttctcggattatgtgcagcatatttccaatatttttgtggctaagctgctggatgaacaggaaggccgtaatgccgcgcagaaggtattactgagcctgatagagtttatggatcagggcgttctgatcctggatgaggcaaatcatctgaaatttgccaatccgcatgctctgaagatcctcaatgtcccgcatgaaaagatttccggcaaaaccattgccatccgtccgctgacctatttcaagagtctgaaccgcgggcatttacagcatattgtctcctgggaaggggagagcaatattattatcgggcagcttcatgtggttaacggctgtcagatgttcctgatggcgtttcatcagtcccacgcggcgattgatatgaatgaagtgcgccgtgatgaaaacggattgctgattgaacacctggtcggggaatccgaacctatccgtcagctgaaacacctgatttcccgcgtggcaccgagcccgtcgagtattctcgtcaccggtgagagcggcaccggtaaagaagtggtggcgcgggctattcataagctgagtaaccgcagtgaaaaaccgtttattgccatcaactgtgcggcgataccggagcagttactggaaagtgaattattcggttatgtgaaaggcgcgtttaccggcgcgtccgccaacggaaaacagggtctgattcaggcggcagataaaggcacgctgttcctggatgaaatcggcgatatgccgctgattgttcaggcgaaattattacgtgcgatagaatcacgcgaagtgcagccgattggctcaagccggaccatcccggtcgatatccggattgtgtccgcgaccaaccagaatctggaacagtttgtcagtgaaggtaaattccgcgaggatctctattaccgcctcaatgttatcccgattgccctgccgccgttgcgtgagcgtcacggcgatgtggagctgctggtgcaccatttcctcaatgtgcataccaggcgcctcggtctggtgtatccgggcatttcggatgaggtgatggcggtcattaatgcatggccgtggccgggtaacctgcgtgagctgagtaacctggtggaatatctggtgaacgtggtgccgccgggtgaggtgattgatatctcactgctgccgccgaactttgccagacatgcggcgcagatgataagcggcactgccgcaccggttcagaataccggggatattcaccgcagcgaaattaccattccggtcagaagcgtacctgcggcagcagcggatgaggatccggcactgcacggggaaaccatgctggaagagatggaaaaacagatgatccgcgaagcactgcagcgctatgacaacaaacgtcaggcagcagaggagctggggatcggtattgccactctgtaccggaagattaagaagtacgagttatccgccgggtagcagaaagcggaagaaaatgtgtgtgtgccgaagccgcacggatgttaccggtccgcgcggctttttcgtatcagataacggtcatgatctgctcttccggcaggcgggatttcggcagcgcggcgttaaagtcatcctctttgcggtaaccgagcgacacaacggctaccggtgccagccctttggcggataaaccaaattcggtatccagggtattaaaatccattccttccatcggaacagcatccacacccagcgcggaagcacctagcagcaatgtccccatgttcaggaaaacctgttttgccgcccagtgcggcagatcaccgagtgtttctttatggagattaacaaagaaagtccggccgccgttattcatcgctttgtgttccggcgtggtgtaacggccgtctttgtcttcctgttccagaacgctgttcatgtaggcttcatccacatctgtttttgcgcacagcagcacaacatgagaggcgtcggtaattttggcggtattaaattcaaagcccgggcgggtggatgccgcgatccggtttttcccttcctcactggccgcaataataaaatgccacggctggatattgacgctggacgggctgtagcgcagcaatgttttgatactgttcatcacctcatcactgatttttttcgccggatcaaaggatttggttgaataacgctgcattacagcctgagtgatggtcatgatggcatccttataaggtaatttacattaaccggcgcaatgataaactatgatatgtttttaacaagtacgtacatttttggtatataggtacaaaatggatactgtcagaaagacgcgttacgagtcgtatgcttatgaggcctgtccggttgaggcaacactggaaatgatgggcgggaagggcaagggaatgatcctttaccatctgataagcggcatcaaacgctttaacgagctgaaacggctgctgatatttattaccccgcgtatgctgacaaaacagttacgggagcttgagatagcggggcttgtccaccgcaaggtctatgcggaggtgccgccgaaagtggaatacagcctgacggacgccgggcagtcgctggtaccgatcttactgatgctgaaaagctggggggaagaacacgccctgccggtacttttgcagcaacagacaccgcaaccctgacaccgccgtcctgaagacggacggtgtctattttctgcggtttactgattacgctggagtttatccgcggcattggcaaccatctgataaccggtgcagcggcacaggttaccggccaggccgtggcggatctgacggatggtaagggtctgccctttgtgtttttccagcagggcggtggtcatcataatcaggcccggggtgcagaacccgcactgtaccgcgccgctgtccgcataagcctgctgtaccgcagacggtttaccgtgcttcatctcaccttcggcggttcggatctgcttaccgtccgcccagaccgccagatagagacaggtatccaccgcgataccgtcgataagtaccgtgcaggcaccgcactcaccgacagagcagccatgtttgacactgataagcccctgctcacgcaggacatcggacagccgtgccgccggtgacaccgtcagttcccgtacctgtccgttgagtgtgcagctgatggttttccattctttgatattcatgcgattttttctcccagacgttcagccgccgtgcggatcacccgctcgctcaggacgcggatcaggtgtaaacggaactctttctctgcccgccatgacgtgcgcggtgccacatcctgttcaatcgcctgactgacagctttcagagtgtctgcggtgaccggttttccgatcgcagccgcttccgcgtgttcacagcggaccggtgtcggtgcggcaaccccgaaggcgaggcgcagttcctcaaaacgtccttctctgatatcacacagagccgcgcagttaatggtggcgatatccatcgcgccgcgcatggcgtatttataagcggcggagcctttaccacggtaattctctggtgagaaatggaacgcgatcagcagttcacccggttcaaaggccactttacccggaccggtatggaagccgcgcagtggtctgcggcggatgccgtccggggtggctatctccagctctgcctgataaaccagggacggacaggcagagtcgccgctggtggcgccgttacagatattgccgccgtaagtggcaacgttgcggatctgcggtccggcaatggtggcagccgcttcgctcagcgcgggcagacacttgttgatcaccgggctgtcaatcagttcggagaaggtggttgcggagccgatacggatatgtcccgcatcatcacagctgatcccgcgcagttccggcaaatcatggatatccacaatacggcggaagcgttcattgaggtgatgaagctggatcagcacatccgttccgcccgccagcaatctggcctgcggatccgtcgtcagcagtgagacggcatgtgcgacactctctgcacggtgataagtttcaaaatcatacatggcagttaccccctgataagcccggcattaacaaattcccggtacagccgttttggtgtcagcgggatagtattgacagaaatacccgtcgccatacgcacggcgttacggatagcggcagccggcgcaataatcggcggctcacccagggacttatggccgtatgcggactgcggctcgtaggtttcgacaaacccgcactccagatccggcaggtcaaccatggtcggcattttgtagtcgagcaggttcgggttatgaacaaccccggatttctcgttgatcagcatctcttcaaacagcgcccagccgatccccattcccattccgccgtggacctggccttccgccagctgcgggttcaggatccggccggaatcgtgcatattgatgatccggttaatggtcacctgacacatcggaatatccacggtgacatcgacaaaagtacagccgaaggccggcgggttggtctgtgttttatgagaggattcagcagaaagctgaccaccgatctcctgatgataaaaactgtgcattgccacttccgcgacggtggtgacaaccacgtccggctgcgcctcaagcaccacattgccgtcgagaatggtcatattaaacgcggcctggtgtgtcatcagcgaggcatgatcgaggattttctgccgcagtgacaatgccgcttctttcagcgccggtgcggtgacataactctgccgtgacgcgaacgcgcccgggtcaaacggggtgatatccgtatcctgggtggagatcatctgaatggtactgaccggcacgccgagggtttccgccaccatctgcgagaacacggtatccgagccctggccgatttctgtcgcgccgacctgcacattgatattaccgtcctggttcatcagcagacgggcactggcgatttccacgccgaccggataggtattggatgaataactgaaacaggctacaccgacgccccggcggatgtctccgcgtgttgccagcgcctctgctttgcgttcatcccagccgaacagctctttaccgcgtttcaggcactcaatcagccccgcactgtaaatcgttttcttattgaccgggttacagtcaccggaccgcgccgcattacgcagacggatatccaccgggtcgatattcagctgtgcggcggcatcatccatcaggcattcgagggcgaacgtgacctgtggtgctccgtagccgcgcattgcgcccgctgacgggtagttggtatagacggtggcggcggaatagccgtaatcgcagcgcggatacaggtacgggattttgttcccgcccgcagccgcaatggagtgtccgtgagaggcatagccgccggtattggacagaacatcaagatgataaccgttcagtgtgccgtcggcggtcagtcccatctccgcatcaatatggaaggcgtgacgggtgcgcgaggcaaagaaacactcttcgcggctcagctccactttcaccggaataccgccgagtttcagggtcagccaggcggccatcggctcttccagcacgtcctgtttattaccgaaaccgccgccgatatacggcttaatcacccggatatgcgaccacggcatatccagcgcctggcctatcacacggcgcacaatgtgcgggatctgggtactcgataccacggaaatcttattatccgcctcctgccaggcgtagcaggtgacgccttccatatggcaatgctgaaccaccggggtatcaaaatggccgcggaactggaacggcgactgactgactgtcgctctggcgctttccgcattgatagcggtacgtttcagcaggttaccgcagctgtggatttgcggggcatctgcggccagtgccgcctccggtgaggtgataaccggcagctcgtcataagtgacgctgacgagtgccgccgctttttcggcagtcagttcgtcacgggcaaccacaatcgccacaccgtcgccgtggtggcgcacatggcggttcagcagcaggcggtctgccacatcacgtttggccggttccagagaccaggcgtgaccggcggtggcgaacgggatctgcggcacatcgttacaggtgaataccgcgaccacacccggcatggcgagcgcctgtgacgcatcaacggatgttaccatcccgtgggcaatggtactgcggacatatttggcgtagtgcatacccggcatcggcagatcatccgtgtagcgcgcccgccctgatgttttgctcagggcatcaacgcgcaggtaaggcgtacccagcgcgcgttttccgactgcttcagacattattatttctccggcttcaggaaaaagtaagcatgcataaaaacaagcaataaatacgccagcagggagaaaaacagcaatttatcgggggatttgtgactgaggtaaaaaaaataagggtgtccggcaggaaacggcggattttcctgtcccgctttctctcatattgagagaaaaatgtgtctgtattgataatcccggagtaccgcagaagcagaatgataatttatagtttgatagtgttactaatcatataatgcgtaataagcctgataaattctgtcgcttttaaattataagaagataatagattactaagaaaataatgataataatcaacccggaaaaaggaacggaatcccggtcgcataattgaaaaaaagagaatccataacggaattattcatttatactgccgtgaatcatccgggataacagcgggttatgtatttgttctgtgtctgtcgttttattttcatatttacagaatggttgtctgcggcggttaatcgattttattcgtgaataagatataatgccgcctcaggtacaactgtgcttatattctttttatgatggacagataccgggtgatacttatttttaagacttgttacaaactgtccggcaaatattccggtaccgttttgtaaggtaaactgactaatttatgttctcggcctgtaagaaacagaccggcagagcagaataataacgaagccaaatcgttgacgatgacaagcgtgagaattcagattgtgcggctgcagtaaggtgttcggataacaaaaaacgaatagttcagactcgcccgcgacgtagtgtatgttacataagcctgagttgtgacacgtcagagtttattttccacggctctggctatacaattggtgcctatttttgcacaacgcagcagtggccaaattatttctctaaggtgaaactatgttatccaagacagcactgaacaaaatggcggggatactcctgttgggaggcgttgtaaccctgtccggctgttcattaacgacaccctctgcgccgaagcctgcggcacaaccggttcagccggcggagcaggagccggtgagaacgactgcacctttgccaagacctgaattacagcaaccctccggacagatttcgcctgagctgagtatgtgtgttaaagaactcgactcgctcaaaactatttctccgaaagattacagtcagatggtcgccggtttcagcgaaatcagccagatcaacagactgtatcgtcagctcgaaagaaccgccagcccggatacgcttaaattactgaagatgtcgattgaagcgaaaaccaaagtgatgtgtgcccaggttcgttattattctgttctgtctattgagaataccctggagaaggttaacgggttatgagactgaacatcaggttgtgtattactgtcgcattgtttgcggcagtgcaaccggcaactgcatctgaatttaatcaggttattgaagattttgaccgttatattcaggctgaaaaagcatcaggcaattttccggtatcagtgcagcaacctggcaggtctcccgaaacccgggttacaccgccggtaaatacggcgggtaaggccactcagtcacagcgtcagggcacacgtaaagctgcccgcacaggaaaacgcactgtttcgtccgcgcaggaaagccggacacaaacagctgccgcacagaaaactgacacaacaaccccggggatctccgtaccggcacaatgcgaaaatattgtggtcagggaaccggttgttgtgaccaatcctgttccgatcggatacccgcagtggtctccggcttatctggtccgtgacagccagaaatggggcggaaatcaccggggatttgtgttctcacctgttccttcccgtatgacctcctcactgactctcacaccggaagccttgtttgccatcccgggtgaacctttccgttcaatgacgtatttctctgatctgccgctgacggttgcccgtgtgctgaaaccggaaacctggtttacgccgtctgatccgcagaaacaactgcgcctcacccgcctgaaattacaggatgtgaagcgtgaactcgcgtcactgaacgaaaagtaccggaatgttcagcataattatgaacaggcgctcgcggatattgcgaaaaaagagacagagctcagcaatctgactctggcaaataatgagttacagactgcggcaaaaagcgacagcgccaaactgaccgccgagctggaacagaaccgcaaaacgattgattcactcaatcagcagataagcgaaaacctggcccgttttggtcaggcggaaggtcaggtcacggctctgacagccgaaaaagccgatcttgaaaaacagattgcggcgctgaataaagaaaaagcgctggcagataaaaatctcgcgctgctggaaagcaaaaatgccgatatggcaaaaatcacgcagaagctgacggaactggaaaaacagctggctcagcgggatgcggaaaaacagcagctgaatgacaaaatcctcgcgctgaccggtgaaaacagcaaacagagcgacgcgctgaaaaaagacctggcagcactggcggcagaaaaagcggcactggaaaagcagattaccgggctgaaatccgataatgctcaggcagagaaaaatctcgcgctgttgcaggataaaaatgctggtatggcaaaaatcacgcagaagctgacggagctggaaaaacagctggctcagcgggatgcggaaaaacagcgcctgacagcaaaactgcaatctcaggaaaccgaaaacggcaaacaatcagccgatctggaaaaaaggatcaccgcgctgacagcggataaatcggcgcttgaaaaacaggttgcgcagctgaattcagagaagagccgggctgacgagaacctcgcgctgctcggcagtaaaaatgccgacctcgcaaaacttacgcaacagctgacggcaacagaaagtaagctgaaacaaagtgataccgaaaaactggcactgaccgcacaactggcggaacagggcagtaaaagtgcgaaacagagcgcggagctgaaaaaatctctcgacggactgacggcagaaaaagcagctctggaaaaacagatctctgcactgaccgcagataaaaacagcgcctcagccaaaaataccgaactgctgaatgcgaaaacagcggaaatgcagaaaaccaccgcgcaggtttcagagctggaaaaacagctgaaagcaagcacagcggaaaaacagcgtatcgcgcttgaattactgcagaaaaccaccgataaccagcagcagaatgcgcagctgcaaaaagatctgaccgcactgaccgctgataaaacggcgctgaccgggcaaatcacccggctgaccgaagagcaggcacaggctgaaaaaagtatcgcacagctgagcagtaaaaatgccgatatggaaaaaatggttcagcaactgagtacgctggagcagcaactgaaacagcgtgataccgaaaaacaggcgctggcggcacagattgcggccggtaatgctgacagtgacaaacagagcgcacagctgaaaaaagaattcgctgccctggctgcggataaaactgcgctggaaaaacagattgcacagctgacggcagagaaagcacagtcagagaaaaatgcggcactgctgaatgataaaaatgccgatctggcgaaagtcacccgcagcctgaccgatactgagcagaagctgaaaaataccgaaacagaaaagcagaaacttgcagatcaactggctgttcagaataaagatgcggcagcacagagtgacaagctgaaaaaagacctcagcactctggccgccgataaaaccgcgctggaaaaacagattacacaactgaacgccaaaaataccgataacgcaaaaatggcagctcagttgcagacactggaaaaagaattacagctgcgtgaggccgataaacttaagctgacagctcagttacagagccgtgaggcggataatgcccgtcagagcgataatctgaaaaaagaggtggctgcgctgatcgtggataaagccacactggaacaaaaaattgcgcagctgacggcggataagcaactgctgtcggcaaaaatatctggtgcagataaagagagcagtactgttcaggcggataatgccggactgaataaaaaattagcggcagaacagcagcgggctgctcagctggataaagccttaaaagaaaaaacacagcagattgaagcactggcgaaatctgatgcggaattaattaagctgaatactcagcttgataaccagaaaaagcagctggcagataaagatgcagaactcgccaaagcggcggctaagctgaaagaaaatgccgatctctcggcaaaatacaccgcattgcagaaagaaatggataagcaaaaggcggttgtcagtgcacagcggacagaaaataccacgctgaatacacaaattgcgaaagcagaagaaaaaaataaagccgtggcggcttatactttccagcaggttggtgagctgaataaacggaaaaaccaggagctgatcgcccgcctggagcgccagaattattccaaaatgacgccggacgtttattaccgtatcaccaaacagggacagaaatataaagcgctgaaaggaaaaacagtcacatttgcgatgcatgaggaactaactgacggtaaagtaaccgtgtcatatccggtaaatgcaccggcggttattccgttcaatgaattaccgggtgacctggctaaattcgtttcacttgccggcgcaggcggtgcggttgatgtgtatataaaaccggaaggcggttatggtgtcgccggtattgaagggcagataccaccgaactcaatgtctatgatcaaactgaacgtgctgaaaatagaataatccggcgattatgtgaatactgaaagcatcctgtaacggatgctttttttatggcgtattattacaggaagacagcgaatttcagggaataacagcggggcatgtcattattgctgattggcagtatcagcatgaaaacacgcaggggaagagtggtataaagagaagggagttttcaggcagcacacaactccggtttacccataaggtgggtaaagtgcattttgtttcatttgtaacaaaatattaaaatgagtaatcaggtattaaatactattaatgaagttttatatctgtattacaggatgtcagatctcattatgtcaggttttccggaatatatgactgccggtatgtgtcgttaatatcagagtgataccctggtgtattatcattacattacaatttgtcaccagtggtaacactggcgcaatccggaatatgatagaaatgacaatctgtattaacagtgaaacatcagaagcagttaaataagcaagcagaagcaggtaaaatcatcggtatatttattaactacaaaagcggaatataaagtttattataaaaacggaaatgctcagattgaatctgaatagtttttatagaaatcatattcctgcaccagttgtagtaatgatttaatacgcagcttggtatacatattagaacggtgtacttcaacagtacgcggcgataatgataatttttgtgcagcttctttactggtatttccttccagaatcatatccatgacctctttctcacgggcagataacttgctgaatttatctttaaagcgttgatatctatggtacttagtgaggctattttcatattgattaaatgcgtcatgaatcgcattaactaacagctctgaattaatcggtttcttgaagaattccagaatacccgctttaaatgcacgacggcaggtctcaaaagacggataagcggtgataacaatcacaggaataatgcttttcaggcgtttgagttcatcgataagatagaatgcctcagcagatgattctcccacttccagaataatacattcacgggcatgctcttttggcgtattaacataatatttcagaaaagcctgctcagatgaataagattttacttcacaattcatattatcaagcatgaaattgatattgttgcctggtaaatcagcacagttgattaaatgaataacggcatccataagttactcctcaattaaaataggacacaaaacaaaccgatattaacggataaaaataagggcataattacttaggtttatctacgcaaattttatgtattgtagataagataacgtcgaggaaatgtttaaatggataagtaaatttcatttcggaatcggtgtatgttttttaataaaagcaaaataatgtggatgttttttatttttatttttataaaacaatacgttgctattgtttaaagttcgtttaatttatggagtaaggggttttttatgaaataaacatttacatttgctcttgggattacagacacaatatgttataaatggcagctcacattttttctttttcacgcgacagaacaaacacttattttctactgataataatatggcatcactgaaagatgttgcccgcctggcatcagtctcactgatgactgtttcaagggcaataaataatccggaactgctgaagcctgagacgttgagacaggttcagcatgctattgatgttctgaattatgtaccggatttatcagcccggaaaatcagaggtaaaaatacaaatctgtcgtgcatgggggtattagcaattgataccgcctcagccccgttttctgttgaaatactgctggctattgagcagtgtgcagaaaaatatggctgggaccactttgttgttaatatttcatccggagatgacccggttgcggctgtccgccagattttatcccgccgccctgacggtattattattaccagtgcagaattgcgtgagataaacattcctgagttactccgcgacagaaacctggtattaacgaactgctatgatcccggaaatacagcgttaccgtcttatattccggatgattatcatgctcagtatgatgcaacagaatatcttattcagcggggttaccgccgcccgctttgtatctggccgccggcggaatgcctttcatccggtctgcgccgtgatgcggttcagaatgcgtggctgaatgcgggattgtcagccggtcagctgaatcagcacaacatcacattatctgatatttattaccgggacgttgtgacactgatagatcaatacattgacggtaattcaccgttatttgactgtattatctgtggtaatgatcagatagcctttgttgtgtatcaggttttattaacccgcggtatttctgttccggagcaggccggtattctcggctgtgaaaatatgaccggtaccggagaacttttttatcccccgctgaccactatccgctctccgtatcgcctgctgggtgaaacagcggcactgcatcttattgaggaacgggtttcgtcagggcggacttatgtcccctgccggatgctcagcagagagtcactctgatcccctgctgttacacaatcctttctcttttttcctgatttttatccgttcacgtttggttaatttttttaattaaccaaaggcaggctgccggataaaaaatcagcgcagcgttatttttgtaattacggacttatctgtcgttttgagtgcaacattaagcgtaaatttcgctttagctaaacacaaaactttcaatgttgtattttaatgttgtttctttgatttttggttcgtagtggtaattattattacttacctttcaatgttaacgttaaaatagttaattaaaaaaaggtaatgatatttttcagagacaaagctaccgcacgaaagatttttcaatctccggagggaaatgtctgacgtgttgctctgtttatcgtggcaatgaacattaaatgattatttatcgtttgtaatcaatgcattacgagaggctgtagtttccagagtataaaaaatcaggggatctatctggctataatcactcaaagttaacgttaacatcaaatgttaggaattatacccaaaaatgatttgttaatgatacttataatgttaacgttatcaatatgaaaatcaagcgagactggtgttttatagctatatctgcgtagtaaacagcgtggtttcagtgaacataatatgatgtatacgggagagaccggtgacgggaaataaattgagcaggcgcatgggatttttaatgcaggggggtatgatagtcataacataatgataaacaggattggctgaaccatgtttttacgatccggcgcgatgctggcgattttttcttattttctctgggggatcacaccgcttttttaccgcctgctgccgggggtgcagccgctggagttattatcccagcgtgtcctctggtcaattccgctgttaatatttgtccgtttctttttaaaaaaccgtacccgggtaaaagcggtatgggcggataaacgctcgctgctgctttgtctgctcagtaccagtgtgatggcaatatcctggtgcacctttacctattcaatgacccatgatttggtgctggaagccagcatgggatatttcatcacccccttgttttctattttactgggtgtcatcttcctgcatgaacgcctgaaaccggcagagaaaaccgcgctgatttttgtctgtgccggggtgggttatcagctttatcagtacggcagcctgccgaaactggcgctgatgatgggctctgcgtttgcactgtacggctttatccgcaaatttatccgttatgacctgacgacttcactgctgattgagagtctctggctgctgccggtggctattgtgttgtatttctggcttgaaaacagcggagcgggcacattcagcaccgcagatacctttacccgcatctgttttatactgaccgcacctgtcacgctgctgccgctgctgttcttcacggcggcggtgcgttccaccacactgaccactatcgggctggcacagtatctcgagccgaccattcagttcctgctggcggtgttcctctttaatgagcattttgatgctgtcaaaggcgtcagtttctcattgatctggctgggattgttgttctgtatcctgtctcttatccgccatcactggaaaaatacagcaaaagccggtctgggtataaaaccccgctgagcgctgtgacagccggtgatttgcttatttcgtgactaaagcaaacgattgcgtatataatggcgcgcaaattttccggtatttctgaacaggtgacagtgatgacaacattaggtacggcattacgcccgggggccacaaaagtgatgctgctgggcgcaggtgaattaggcaaagaagtggcgattgagtgccagcggctcggtattgaagtgattgctgttgatcgttatgacaacgcgccggccatgcatatcgcacaccgccgctatgtgatcaacatgctggacggcgcggagctggaagctgtgatccggaaagaacagcctgaccatattgtgccggaaattgaagcgattgcgacagatacattataccgtttggagcaggagggttttcatgtcgtgccctgtgccaatgcggtaaaactgaccatgaaccgcgaagggatccgccgcctggccgcagaagagctgaggctgatgacatcagaataccgttttgcggatgatgaggcgtcttttatccgtgccgccggtgagattggatttccctgcattatcaagccggtgatgagttcatcgggtaaagggcagagcattatccgcgatgaaagcacattgcacgatgcctggctggcctctcaggaagcaggacgcgccggaaaagggcgggtgattgtcgagcggatgattgatttcgattatgaaatcaccctgctgactgtccgtgcggcagatggtgtgcatttttgtgcaccggtcgggcaccgtcaggagcgcggggattaccgtgaatcctggcagccgcaggccatgccggatgctgttctggcacgggcacaacaggtggcggagactatagttaacggactgggcggctatggtctgttcggtgttgagctgtttgtccgtggtgaggatattatttttaatgaagtttctccgcgtcctcacgataccgggctggtcacactgatttcacagaatatctctgaatttgccctgcatgtgcgggcgtttctcggattaccggccggagagatagttcagtaccgtccggctgcctcagcggtgatcctgccgtcactgcgcagcgatgatgttcgttacagcgggctggagcacgccctgaccgggactgtgcagttgcgtctgtttgccaaaccggagattgacggctcccggcgcatgggcgttgccctggcgctggcaccttctgttcaggaggcggtaaatactgcaaaacaggcggcggcatcagtagtcgtcaccggctgaccggggtaatatctgtgatggccttcccgtatatataaagaggaaggcatcacagaccgtggtcaggcagaggaataaccgatgagatgcagaataccgggaatcgtatttgtaatgttgctgccgctgactgcatttgccggtacggatgtgcaggcagaaaaagcccgtgaatgggtgcgggcccgcgcagatgaaccgtcagtggcggataactgcttcaggccggataatccctttgagctctgtctgtaccgggataaagataccttcggcagccatttcgttgaccgtaatctgcaggaaccgtatcagccgtactatttcgacagtgcgccggacgaaccggaagacgggcgttaccgtatccgctccggcaataaaatcggttatgcggacagcgtcaccgggcgggtggtgatccccgccatttatgactgcacgtacggctttgtcagcggtaccgccgaggttggcgtggggtgtgaagaggaaaccgacggcgagcactcctggtggaccggcggtcactggttccgtatttcaccttacggccttatcaccggattcggccggacaccaccgccggacagccgtttatgatgctgcaccgtaacggcggcgggccagaatccgcaggcgccagctgtgcagaatataggtcaccagcaaaataaaggcgaccactccccagacaatcatttcaccatagcgggcaccgaagtccgctatctgtgctttgcccggattatccttctgataataaacacccaccggaccgttttcacactgtgactggcacagcaactgatctgttgaggtaaaggtcacgattttattatccgctgtcacgaatttcaccaccggccagccgaccagttgctgtcccgaacgggtatcgcgcatttctgtccgcagataaccggttatctgcccgtcagcatagacatcattctgttgtgtctgccaggtctgataaatcataaatccggcgaggaaaaccacactgaaggtcagcaggcggagaacccgctgaaacagcatattgcgttgtgtctgcttatcagcataagcacggaagttgccgggaggtgtgccgggttttttagtcatatcggttactgtcttctgtcggtttcaggtcataaatcacggagaaaagcggataaaagcacgctttcataaaaaattaacaaaaagcacgaaaaaatttaaaaaacataacgttaacccgatcacaaattttaccgtcccgggaggcggataaaaccgcccggctgtaaaaagtgaccgcttaatctgctatacaaccgcttacgggataatccccgtttcccgccttgatttttctatcataaaacacacttgcaggaagtttctattttattcggctgaaacactttttccgtacggatacggatcattttgattatcacagtcacatttaaggtgcgttatgaactctaatcgcttatttaagcacattccttggtttatcctggggattataggtgctttctgtctcggcgttgtcgcattacgccgcggcgagcatgtcagtgcattatggatcattgttgcatcggtatcagtctatctggtggcgtaccgctactacagcctgtatatcgcaacaaaggttatgaaactggatccgacccggtcaacaccggcggtgattaataatgatggtctgaactatgttccgactaaccgtaacgttctgttcggccaccactttgccgcgatcgccggtgcgggtccgttagtcggaccggtacttgccgcgcagatggggtatctgccgggcacactctggctgctggccggtgtggtgctggcgggggcggtacaggactttatggtgctgtttatctcctcgcgccgtaatggtgcatctctgggtgagattgttaaagaagagatgggaaccgtgccgggcactatcgcgctcttcggctgcttcctgattatgatcatcatcctcgccgtgctggcactgattgtggtgaaagcgctggcagaaagtccgtggggtgtgttcaccgtcgtatccactgtgccgattgccctgtttatggggatctacatgcgctatctccggccgggacgtgtcggtgaagtgtctgtcatcggtattgtgctgctggtggcggctatctggttcggtggtgtgattgcacacgacccgtactggggccctgcgctgacctttaaagataccactatcacttatgccctgatcggctatgcgtttgtttccgctctgctgccggtgtggctgattctggctccgcgtgactatctggcaaccttcctgaaaatcggtgttatcgtcggtctggctgtgggtatcgttatcctcaacccggatctgaaaatgccggcaatgacacagttcgttgacggaaccggtccggtctggaaaggtgctctgttcccgttcctgtttattactattgcctgtggtgcggtttccggcttccacgccctgattgcttccggtaccacaccgaaactgctggcctgtgaaaccgatgcccgttatatcggttacggcgctatgctgatggaatcctttgtggcgattatggcgctggttgcagcctccattatcgaaccgggtctctattttgcgatgaacaccccgcctgcggcgctgggtatcaccatgccggatctgcataacctcggtaccgcagatgcaccgatgatcatggcacagttgaaagatgtgaccgctcaggcggccgcgacggtcagttcctggggctttgtgatttcgccggaagagattttacagaccgccaaagatatcggtgagccgtctgttctgaaccgtgcgggtggtgcaccgacacttgcggtaggtatcgcgcatgtgttccacaaaatcattcctgcagcggatatgggcttctggtaccacttcgggatcctgtttgaagcactgtttatcctgactgcactggatgcgggtacccgttccggccgctttatgctccaggatctgctgggtaacttcgttccgttcctgaagaaaactgactccttcattgccggggtgatcggtactgccggttgcgtgggtctgtggggttatctgctgtatcagggcgtggtcgatccgctgggcggcgttaagagcctgtggccgctgttcggtatctccaaccagatgctggcggctgttgccctggttctgtccaccgtcgttctgattaagatgaagcgcagcaaatatatctgggtaaccactattcctgcggtatggctgctgatttgtaccacatgggcgctgggtctgaaactgttcagtgacaacccgcaactggaaggcttcttctggctggcgaatgagtacaaacgccgtattgctgaaggtgtcgcgttaacgcctgagcaggtcgccaatatgcagcacatcgtggtgaacaactacaccaacgccggtctgagcattatcttcctggttgttgtgtacagcatcatcttctacggcatccgtacagcgatgaaagcgagcaaaaacccggaacgtactgataacgaaactccgtatatcccggttccggaagagggaattaaagtctcctcctcacactgataacagcatgcagtaacgctgaagtctcatcccccgtatgatgtcagtcacattgtacgggggatattttttattatccgagttatttgttactctgacagcctttgttccgctgtctgtctgtaagaaggacccgattatgcaacctatctccgtgactatcctgaccggtttcctgggtgccggtaaaaccacactgctgcgccatattctccacgaggagcacgggcagaaaattgctgtgattgaaaatgaattcggcgaggtgcctatcgatgatgaaattatcggtgaccgcgccacgcagataaaaaccctgagcaacgggtgtatctgctgcagccgctcgagtgagctggaagatgcgctgctcgacctgtgtgaaaacctggacagcggcaaaatcgattttgaccgcctggtgattgaatgcactggtatggctgatcccggcccgattacacagaccttcttctccaatgaaaaactgtgtgaacgctatgtgctggacggcattatcacgctggtggatgcggtgcatgcacagcagcaactggatcagttcactatcgcccaggcacagattggctacgcggatcgcattctgctgaccaaaacggacgtcgagccggataatgaggcgctgcttgcccgtttgcagcggattaatgccaaagcgccggtgtataaggtgattaacggtgatatcgacatgaacctgctgtttaatgtcggcggttttatgctggatgacaatgtggaaatcagcaaaccgctgttccgctttgcgccgaaacagcagaatgacattcagtctctggtgatcaccatggataaaccggtggaaatcagcgccatttcccgcgccatggaaacgttgttgctcagctatgctgataatatgctgcgttacaaagggttactctggattaaagatgagccgcgccgcctgttattccagggcgttcagcgtctttacagtgcagattttgaccgcgaatggcgtgaggatgatgtaaaacagagtgtgctgatttttatcggcatgcaactgccggagcaggaaatccgcaatgcgtttgccacgctgacggcatgataacagcggatattcacccgctcaggtcgttgtaaaaataaagcatgaaaaaaccggccggtgcggccggtaaaggaaagggggcttccttaaaaagccaaacccggaaaaatcaggctgattttgccttgtttgccatgatttcaataatctgcacgtcggtgtgctgcatagacaggctggccagcgaacagaggttagcaatggatttatccacatcggtacagacgatgccgtcgttaccgctgacacactgctgattcatcgccatcagcaccgctttataggctgcgctgacaccactggagactttcatcgcgcagctgttggaagcaccgtcacagataataccggtgatatccccgatcatgctgctgatagccatcgccaccggctcatatttcccttcaaataaccatgcgataccggctgcggcccccattgaggcggtcgtggctgcacacagcgccgaaagcggcgggaactggctgtgaatataaatcgccatcaggtgggacaatgtcagggcacggataagctgctcttcatccgcctgtaaatattccgcgaccaccaccaccggctgggtagcggcgatcccctggttaccggaaccggagttgctcatggcaggcagctgcgcgccgcccatacgggcatccgaggctgacgaggtgcggatcataatgtcggacagcagatcttttgacagcaatccgcgctcacgctgtttctccagcgaacggccgatttgtaacccgtacgggttggacatgccttcgcgggccagggcatcattcagatcagcggcctgacgcataaaattgatcatcgaaaccggtgcctgagtggcgaaatcataaatatcacgggcgcaggcatccgcgaacggattatcgctgccgccctgatgcgtgatcgcatcatcctgataaataatcgtgccgttatggctgatttccgttacatgggtatgatcgccgcagatagtgacggtggcctgatcgtcgccgctgtatacggtggcttcagagtaaagcacgtggctgcacggttctttgatttccacagacaccgcgccggaggcgagaaaggctttcccggcggcgatatcgtccgcagtcaccccgcacaggacattcagaccggcatccggctgtccgccgatagcgccgagtgccgcagcgaccggcaggccggtcatgcctgttcccggaacggtcacgccgaggccgtttttcatcaggttcggggaaacatagcagcggatttgagtcggtgcagcgctgaggcaggccgctgcttttgcggcggccagtgccagagaaatcggctcggtgcagcctgtcgccggtttgactgactgacgcagtgccgcgacaaaattgttccattgagcaggggtgtgatgtgttgccatttttcagccttaaatacgcgaatccgttatgcggctcagtgtaccgaaagggaagcagaaaaatcctttcacaattcaggggtatttgcagaatccggagaaaaactttctcccggaaataaaaaatagggcggataggggggaaaaaagcaataaatcgtccggtggtgaaaagagataaaaatacttatctaactatttgatttaaataaagtatcgaatatgatttgtatgcattatgttatgcataaataaaaaagtgtgatgaggccccgtgacagcagtcacgaaaaactgcgttaatagctgtttgtcagagcataactctgtattttttctcttatctgcatggttgtggtgttatcagctggtttgccagataattcccgctgcgcagccgcagcaggaattctgccggaggatcagccctcaatatccagccgttttgactgccattttttcgagcgccagcgccaggtattgacgagcccgcgcagccactcatcacacagaaaaccaatccagatccccagtattcccatttccagtttgatccccagcacatagccgaccggcagtgccacacaccacataaagaacagggcggtacagagcgggaagcgggcgtcaccggcggcacgcagggcgttcaccatcacaatattcagggtccggcccggctcgaggaagactgacagcaggaacagcggcagcagcagttttatcaccgcctggtcatcactcagcccgtaagcgaggtggtcgcggaacagccagaacagaaagacaatcgggatggtgctgaaaaagccggttttcaggcttttcatgccgcgctgataggcatcctcaaaacgttttgccccgaccagatgcccgaccagaatctcattcccgatactgatggttatcccgaacagcataataaacagtgatagctggaagtagatggtctgcgccgccagtgcggtctcgcccatcagcccgataaaggcgatagcgaccatataatgcagcatccagaccaggttttccccggcagacggcagaccgacatgcaggatctgcttcagcatatttctggaccagtgaaacagcatgcgcggcacgaatttaatccgcaggccgtaaaagagcaggccgcacagcagcgccaccgcgatcagacgtccggccaccgtggaccaggcgacaccgaccagcccgtactgcggcagcccgaacagaccgtacagcacaatacagttaccgacgacagtcaccacgttggcgatcagcgtgacatacatcgccggtttggctctgccgtaaacccgcagacaggctgccaggatgatggtcactgcttccggaattaaacagatccccagaatatgcagataattaaaggcatcttccatcagatgttccggcgtattcatcagttccagaattttatagccgaaaataatggtaaacccggcggacaataatcccagcagcaggttaaacgcgatggaaatatgaatagcctgactggccttatcccgtctgcccgctccgatatactgggcgatcaccacactgcacccgacactgatgaagttgaaaatagtgataaacaggtcaaacgcctggttgccgaccgccattgccgccagatattttgacgacacatggctgaccatccaggtattaatcaggaaggtggaaaagtgtaataacaggtcgataaaaatcggccagcttaaggaaaagagcccgcgctctgtcacatcagactgatgcatgacgaccttctgtaaagagtgtgatttttgttccgggacggatacagggagccggattctaccaggataatattactgagaatagcgaaaggtgaaaaataaaacatttttttcataactaattaagaaatcaatgtttcctttcataaataagtatgatttccttatcagactaatcaatgatgacagagagaattccgtgaaaaaaatacgagccgccgtcgttggttacggcaatatcggacagtatgcgattgaggcgctggaagctgccgctgattttgagattgcagggattgtgcgccgcaacccgtctgctgctgatacagattccgtgtatccggtggtggcggatatccgtgaactgggcaaggtggatgtggcactgctgtgctcgccgacccgtgccatccgtgcggttgcttcagagatcctcgcactgggaattaataccgtggacagttttgatgttcacagtgaaattgtcgcgctgaaagagcaccttgacccgattgcccgcgccggtgagtgtacggcaatcatctccgcaggctgggatccgggttcggattccattatccgcacgctgatgcaggcaatggcgccgaaagggctgacgtacaccaacttcgggccggggatgagcatggggcacagtgttgccgccaaagcgattcccggtgtgaaggatgcactttccatgacaatcccgctgggtaccggtgttcaccgccgcatggtctatgttgagctggagccggggcatgatattgataccgtgaccgccgcgctgaaagccgacagctattttgcctctgatgagacgcacgtccgtcaggtggacagcgtggatgccctgaaagatgtgggacacggtgtttccatgacgcacaaaggcgtgtcgggtaaaacccataaccagttgtttgaatacagcatgcgcatcaataacccggcactgacctcccagtttatggtgtctgcggcgcgggcgacctgccgtcagcagccgggcgcatacagtgtgatcgaaatcccgccggtaaacttcctggccggggatatcaacagctggatcagcaaactggtgtagtgatatttcagtcacaaaacagcaataaaaaagaggtgagaacctcttttttattgcctgcaaaaccgataattaaattaactgttatatacgtaatgttattgttgtttattttttctgtgaatacaaaaaagggtaaacaaaccggacgctttctgatgttattcttatttttctccgtgccggctgaagataaaaaaagaacgcgtaattaattaccgaagcaattgattagctgtgcttaatgtattttgatttttttatgaaatcatcatgattatttaatatatcaaagtataataattgagatgttcatcatagacaaaaggattattcaatgtaattttgtgcattacttatccacccagagggctttgtgtatgaatttcttatccatcccaagtcgtcttgccggtgtctgctttgtgcaggcatggtttaatattgatcaccgcatttccaacttcttccctgagtgattctccgtttgcgtatttaccacgaaaactaattaaaaacacgctgatataacgtggctgcattcctgtattttcttttcagaaaaatgcagcggataaatatatccggcagcccgaaaccggagaataaaataatgaaacgtattccagaaccgttccgtattaaaatggttgaaaatatccgtatgaccacccgtaatgagcgggaagttgccctgaaagaagccggatataacccgtttttattaccgggcgatgtggtctttattgacctgctgaccgattccggtaccggtgccatgagtgaccgccagtgggccgggctgatgatgggggatgaggcgtatgccggttcccgtaactattatcatctctgtgatcaggtgaaaaaactgattggctacccgttcactatcccgacacaccagggacgcggtgccgagcaaattctgttcccgtcactgatcgcccgccgccgcaaagccggggcggataaaccggtctttatctccaacttccactttgataccactgccgcccatgtggagttaaacggcgcgaaagcgatcaatgtggtcacaccgaaagcctttgatacaacaacctattatgactggaaaggggatttcgatttagatctgctcaatgcggcaatcgcagagcacggcgcaaaaaatgtggccgcaattgtcaccaccgtgacctgtaacagctccggcggtcagccgatatcactggcaaatatgaaagccgtgtatgacattgccaaaaagcatgatattccggtggtgattgattccgcccgtttctgtgaaaacgcctggtttatcaaacagcgcgaaaaaggctatgcggataagtcggtgaaagagatcgtcaaagagatgtataaatacggcgatatgctgacaatgtcggcgaaaaaggactcactggtgaatatcggtggtctgtgctgtttccgtgatgacgaagatctgtttaacgaagtgcgcacccgctgtgtgccgatggaaggctttgtcacctacggtggtctcgccggacgtgatatggaggcgctggctatcgggctggaagaggggatggatgaggattatctccgctaccgtatcacccaggtggaatatctgggagagcgcctgcgcgaagcggggatcccgatccagtatccggtcggcggccacgcggtctttgtcgatgcgaagaaaatgctgccgcatatcccgggcgatcagttcccggcgcatgccctgaacaatgagctgttcctggaatccggcatccgcggggtggaaattggttctctgctgctggggcgtgacccggaaaccggtattcagaagccgtcaccgatggagcttctgcgcctgacaattccgcgccgtgtctataccaatgaccatatggattatatcgcggatgcctttatccggctgaaagagaaagcggcggatatcaaagggctgacattcacctatgaaccaccggttctgcgtcactttgtcgcccgcctgaaacctgtcatgtaaccctgtcgtcttacaggaggatgcgctgcatcctcctgatttcaaacataatggtaatactaagccaccagaggtactcttatggctactgttcctgcgtcctctgtttcgccgtccgtattcggcggagcaatgattatcggcggaactatcattggtgcggggatgttttccctgccggtggtaatgtccggtgcatggtttttctggtcgattgcagcactggtattcacctggttttgtatgctgcactcgggattaatgatcctcgaagccaacctgaattaccggattggttccagtttcgacacgatcacccgcgatttgctgggaaacggctggaatattattaacggcctgaccattgcgttcgtcctgtatattctgacttatgcctatatttccgccagcggatcggtgctgagccacacctttgcacaggcggggatcacgcttccggcgcgcctgggcggatttctgtttgccctggcggttgcctttattgtctggctgagcaccaaagcggtcagccggatgacgacgattgtgctcggtgccaaaatcctgacattctttatgacattcggcggtctgctgtggaatgtgaaaccggcggtattactgaacgtggcacagccggatgcttcttatctgccttatgtgttgtttaccctgccgttttgcctggcctctttcgggttccacggtaatgtgccgagcctgatgaaatattacggcaaagagcccggtaagatccgccgctgtctgacaatcggcacactgatggcgctggtgctctatatcatctggatgctcggcacgatggggaatattccgcgtccggactttattccgattgcggagaagggcggtaatattgatgtgctggttcaggcgctgagcggtgtactgcacagccggggactggagctgctgctgattgtgttctcgaactttgcggtggccagttcgttcctcggggtgacgctggggctgtttgattatctggcggatctgttcaaatttgatgacagcaaaattggccgcctgaaaaccgccggggtcacctttatcccgccgatgctgggcggattgatctatccgaacggttttatttacgccatcggttttgccggtctggcggcgacggtctgggcggctattgtcccggcactgctggcccgtgcatcccgtaaacgcttcggcagcccgcagttccgggtctggggcggtgagcccatgatctggctgatcctgggcttcggggtactgaacgcggtggtacatattttgtcgagtttcagcctgttgccggtttaccggtaagccattacgtaagcggcaggattgttgagattaatgatcctgtccgctgactcatgagggcggatttttgatataaaaaatgcctgcaatatatattgcaggcacccggtgttgacttaaaaaataaataatttaattatcttgttatatttttaaacgcttctgtggtggcttttaatgccacttctgtcggtaaacgctccatggaactggcaccgtaaaaaccgtggcagtccgggcagcgatctaaaatgtattgtgcatcttccggggtcgcgatagggccgccgtgacacaatacaataatatccggacggacagctttggccgctttcgcccagtcattgatcatctcaacacagtcatccagcgtggtggcggtttccgccccgatattaccgccggtggtcagacccatatgcggcacaagaatatccgcaccggctccggtcatggcaatggcatcttcacgactgaagacatacggtgtggtcagcagatctttttcatgtgccttgcggatcatctccacttccagcgcataacccatgccggtttcttccagattggcgcggaatttaccgtcgatcaggccgactgtcgggaagttctgcacgccggaaaacccggtggctttgatatcgtccaggaatttatcaaactgacagaacggatccgtgccgttgacacccgccagaaccggcgtatgtttcacgaccggcagcacttcttttgccatatccatgacgatttcgttggcattaccgtaagccagcagaccggccagtgagccgcgtcctgccatgcggtaacggccggagttatagataacgatgagatcgataccgccggcttcctcacattttgctgacagaccggtaccggcaccgccgccgataatcggctcgccgcgtgaaatcatgtcattgaattttttcagtaatgtgtcacgggaaagtggcatcttgtgtctccttatttcgcccgtaattgctggtgttgattaatgacaaaacgggtaaattccgggtcattaatgtgatacgggcatttgcgtaaaatacgtttttctgtttgtttataatgagtttcgaacgcctcaataaaggcgcggtccgcatccggcgaccagaacggcataccttcagcatcgagggcggagaaaccgccttccggaatgataaaaatgacatcgccgtgacactggttgagtttttccgcaatccagcgccccatctgtgcattttcttccggggtggtacgcatcagggtgacctgggcgttgtgatgataaaactgacgatcggcgtatttttccggtacggtggacgggcggccgaaattgaccatatccagtgcgccgcaggagccgatatacggcgtctgtgagcgggcaatggcgccgaaacggtcttcatcacaggccagaacaccgccgaaaagatagtcacacacttccgtggtggtcaggtcaaggatactgtcgaacaggtggtcatccgccagtttctccatcgctttaccgccgctgccggtcgcatgaaagaccagacaatcgtaatccgcttccagttctttgctgatttgctggatacacggtgtggtgacgccgaacatagtcagggcaatggcgggtttatcagtaacctgctcttcctgacagaagtaaaccgccccggcaatctggttagccgcattacggagaactttacgtgaaattcggttcaggccggagacatcagtgacagagtagagcatggcaatatcgcttgcgccgatatagccggaaatatcaccggaggccatggtggaaaccatgagtttagggatgccgacaggcagggattgcattgctggtgtaatcagtgccgttccaccggatccgcccaaaccgagaagtgctgcaatatcattttgttttgcaaggaaacgttcaaaggcgacagccattgccgcgatagcacggccgcggtcgccgcagaaaaccgcgctttcgccgtcagggtgacaggcggcgacgtcgcgggcgcagacatccgcttcccgggtcagctgaccgggttttgtggttaaatccacagtctttacagccaggccggtgcgctggatcagctcactgacataaaaaatctcatcacttttggtatcgagcgttgtggcgatatagacagcgcctttattgctgttcatggttaacctcaaagggatatcggatgtctgataacgcatcataaccagaatgagactgtagtatcattttgtttggctgattttgagacatgcatctcaatttgtctatctttaaatcagttttttgataaaaaaaacaccataagggtgttgccggcggggatgttgtgtaagatagccgcgcaaaattcacagaaaattgttaaaggaaaatcagttatggcctgtactgatgatggggcactttactccggcacacggaagcggacatttaatctgctggttaataccgcgctggcactgtttgaacagggcgcgatgccgtcagtctctgaactggcagcggaagccggtgtgtcacgggcaacggcttaccgctattttccgacacaaagtgatttgatcgccgccaccgtggatgcgagcctcggcccgattctgacctggcgctccgacagcccggaaacccgcgaccgcatggagcaattgctggctttcgcttatccgcagatgttccgccacgaaggtgcactgcgtgcggcattgtatgtgtcgttgcagcagtgggcgcaggatcgctcggcttcggccaaatcccagactaatgatgagaaaaaactggtcagagggcaccgcaaggcgattctggctaatgtcaccgagccgctgaaggcgcatgtggatcaggaaacactggataaagtgatccgcgcattttcgctggtgtacggttcggaagtgttcctggtgatgaaagatatctggaagatgaatgacggtgaagtcatcgatattacccagtggatggcaaaagcgattctgaatcaggccatggcggacagccgggcacaacaggatgagcagccgtaatcacggctgttctcttatcttccgtgcaccacactgatttccgcctctgacggtgagaaagttacgcgcataattatatcccctgtaattaattgattccggtgatagactgattttctgttccggcaaccggctgacattataacaatatgaatattatcaaaactgcagcaggggtttcggcctgttttgcggccggattattgctggcatacctgaacgtgccgatggcgctgatgttcggccccatcattctgattattattgcgcaccgtttcaatgtttcgctcactattcctaagggaacattaacctttgttcagatggtgctcggaacatccgtcgggctgatgtttacccgtgtcgatctcagtcagtttgatcatcttctgctgattatgctcatcatggtgtcgtgtctggcggtgcagtttaccgtcagttttctctggttccgcaaacgggtggggtggtcagttcaggaatctctgctgggagcggtgccgggggcaatggcggcaattctggcgctgatggatcacaccggtacaccgccgcagaaggtagtgatttctcatactatccgcctgattattctgattatgctggcgggtgtggtggtcggcagtgatcatcctgtcccgccgcctgcggatattccgccgcagagtctggtgtccgtgctgtggctgctggtgattgtggtgtgcgggtatttgtccggcaaagcgctggaaaaaatcaatgtcccggcaccgtttatgctgacatcactgggcacggcgattgcggtacagagcatggtgagtacttacattgttttcccgctgccgctgaatgatatcagtatgacgctgatcggcatgtatatcgggagctattttgttctgtttccgctgaggtcactgctgcgcaatatggtgacgtccgcgcaggtggtgctgatcaatattgtgctgactgcactgattgcattcggggcgtctcacctgaccggtttttccttcccgatgctgctgctctcctgggcgcccggcagcatggaagccatgacattcgccgcaattgcgatggggatagatgcgggttttgtcatgcttaaccatattctccgcatgctgattattcagagcgtgccgtcagtggtgctgtatattcaggaacggcggagtaagtaattactccgcttttttcacggtcagccgcacagaatagaccgggtctgagtttccgcacatgttgcggtaagacattcctttgatatttaccctgactttcccgcgctccgccggtgttccctgcaaacgggcagcgatcagcgggcgctgatcggctttcatcacccgtgtctgccactcctcaccggtgataagcggtatccattccccggcctcattttttgacatcagtgtgaccgtcatccagtccggtttctcactgacataaaacgggatcattcctgcgtgccgggtgatttcaatcgtttgctcatacggctgaccggtcaccgcatccggtgccgggattttggtcaccgattctgacggcgtaaatatagccataccgccgcacatggcaccataaaacaccccgcagccgcttaacatcccgcacagcagcagtacaacggttcccctgagaaatgaatgagacaggcgcattatggtttcttccctgatattcatgcaaaaaataagtttgccagtataaaaaaagatcacaacaaaaactgtgcccggtatctgtcaattcaggaaatcacacaatatgtactggttaatacaaatgagtcttgttagactttaaaaaccgtactaattagtacacttatggtgtctgttaaccgtgtgaggagtaataatcaaatgacagaaaaagcgcaggatccttcaagacgatctttcctgaaaaatgccggtctcggcacaatggggctggcggccggtgcgctcggcagccattctgcattagcaggtggcaatgccgtgctgacaggggcagatgataaaaataaaagttatatcaaaacagataagcgtaagaagctgatttataacggctatcttatcactatggatgagcagtatggtgatattgaagacggtgcggtgctggttgacggcgataaaatcgtcgatgtcggcccggtgtccaaatttgccggggttgatgcggagctgattgatgcggacggcggtattatcctgccggggattatcgacagccaccgtcatacctggatgtcactgctgcgcgggatctccgcggatatgtcactggccggtttcctcggctctactttctacggcatcggttcagtcatggagccggaagatatccgcatggcggcactggtgggatcggttgaggcactgaatgctggggtaaccaccattcttgactgctgtgactgtgttaactcaccggatcatgcgccggcggcgattgaatccctgcgtgcctccgggatccgcagtatctatgcttatggtatgcaggcctatgattataaaggcagtaaccggttccgcagccatcagcagcgcctggatgtgatgaaaaatattcatcagcaatattatggttccggtaataaaaccctgaaccagatgggtgtgctgctgagtgatttcggtaccattccgtttgcgcataccgcgaaagagattgagctggccaatgacctgggtatctttgtggcatctcataccggtgcggcagaaaaatccattctgctgaaagggttacatgagctgaaacacaataatctgctgaagcccggccatctccacattcactgtacttcgctggataacagcgagtggaaaatcctgaaagagaccggcggtaaagtctctatcgcgccggaaactgaaatgcagatggggatggggcgtccgccgttccgcgccagtcttgaccacggttttaaacccggcctgagcagcgatattgtctgtgtcggctccggtgacctgttctcgcagatgcgtctgggtcttcagttccagcgttgtatggacagcgaagcagaagcaaaccgcaccggcaaaaccaccaccaaaattgacctgagtgtgcgcgatgcgctgacctgggcaacacacggcagtgcggaagcgatggggatggagaaagagatcggctcgattaccaaaggtaaaaaagcggatattattatcgtttcccagaaagaagccttcgtaccgtccagttatccggcgggctcagtggttctgcagaccacatcatccggtgtggatacggtgattatcaacggcgatgtgaaaaaacgctttggtaagctgacacagcagaataccgacaaaatccgttctgatgcgacagaagcactgcgccgtattcagaaagcggcgaaaaagctgccgaaacagacagcagaagaggtggcaaccttcttcgatgccgctcaggagcaggcgcgtgagaatttctcagccggttacagctataaaaaataattgaccgggcagtgtgagcaacacaaaaaaccgcttccgtgaggaagcggttttgtatttcaggggaaaattactgctcttccggcagaataaacataccgtaagggtggatttgcaggaacagactgtcgccgacagacggctgcaattgtgtggcattaatctgcagcagcatggactggccgtgccagtcgacggtcacttcatactgcggccccatataggccacatgagacacggtgcagcgctggctctcatcacccagcaaactcagggtaatggcctccggacggacaccgacagtaacgctgcttttgtccgtgacgaactgcggcggacgcggcaggcggtagctgaaaatctcaacggcatcaccggtcagtgtcgccgggaagatattggcatcacccataaagctcgccataaacttcgaggcaggctgacgatacagctcctgcggcgatcccagctgcataattttccctttgttcatcaccagtaccatatccgagaccgcaaaggcctcgctctggtcgtgggtcacatacagagaggtgatattaaacttctgctgcaattcacggattttttcccgcatgctgcggcgcaggttggcatcgaggttactcagtggctcatcaaataacagcactttcggtttgaggatcagggcacgggccagtgcaacacgctgctgctgaccaccggagatctgatcgacaaagcgatccgcgaatccggccagatccaccagctccagtgcttcctccacccgctctttcacttccgctttcgggcggcccagcattttcagcccgtaaccgacgttatcgccgagggacatatgcgggaacagcgcgtaagactggaacaccatacagatatcacgctgctggatggaacggtctgtgacatcttcgccgtcaatgaacatcttaccttcggtcggtttttccagccccgccaccagacgcagcacggtggtttttccgcagccggacgggccgagcagggtgaccatgctgcccgccggaatagaaagacttaaatcgtcgatgaccgtgttggtgccaaagcgtttagtcacattttttaattcaacaaaactttgttgtgtcatgtcggttactccatgattactgtgcatttttggctttggaacgtgaaacacgggcttcgccaatcaaaaagtcgaacaggaaaataatcgccagcatcacgacgatcaggattgagccataggcaatggccacgccgtactcgccgtcttccacgcggttcagaatataggcggttgccacacgggtgtctggtgtcacgaggaacacaatggcactgaccgtggtgatggcgcggacaaagctgtaaatcagtgccgacagaatcgccggacgcagcagcggcagcaggatgtggaagattgtccgcatcgaaccggcacgcaggctgagtgacgcctcgtccagggatttgtcgatttgccccagaccggcgataccggcacggatcccgaccggcacatttcgcatcgtcatggagataatcacgattgccgccgtcccggttaaatagaacggagaatcgttaaaggcgaggatgtaagacacacccgccacggttcccggcaccgcgaagcagagcatcgtggtaaattcgatggtctttttgccgcggaattcctggcgcaccacaatgtaggcgatcagcaggccgagcacggcggtgattggtgcggcaatcccggcgtagagcagggtatcgagcagtgaaggccatgcgccgtcattcatgccctgaccgaacagcttgataaagttatccagggttaaggtgtaatccacgccccagttcacggtaaagctgccgtagaagatgctgccgtacagtaccaggttgaagacaacccagatggtgaggaaggtggtgacaaacgcaaccagcgcggcaggcagcggctgtacatcaccgcggtaagatttaccggacaccgtgacataagaacgtttgccgatccacatatactgcacacagaagaccagcagcgagaagaccagcagggaggcgccgagggtactggccgcctgataatcgagctgggagccggtgatatagaagtaaatctgggtggcaagcacgtcaaagttaccgccgaggaccagcgggttactgaagtctgccagtgactgtacaatcacaatcaggaaggcgttagccagcgccggtttcagcagcggcataaagacgttgaagaacgtctggaaacggttggcgcgcagggtgtaagacgcttcttccagcgacgggtgaatggttttgatggcaccgtcgaggatcataaaggacatcggcgtaaaggcgagcacctgggccagccagatcccggtaaagccgtacagccagttggtgttttccagccccgcatacgtggcgaggaattcggtcacataaccggaacgtcccatcatcagggtgacacccaggccgacaataaacggcggggtgacaatcggcaggatggagaacacacggccgataattgccgaacgttttgcgatacggctggtataaatcgccagaatcagaccgaagaaggtacagcccgcaccgactgccagtgagagtatcacggagttccagatgacctgcacaatatgggactgtgtgagaatcgatacaaatgcgaacggcgcgaaatccccgttattgtcggtgaacatcgggataaaaatcgcgatactcgggaatacaataaacagcgcaatcagcccgaccaccgcaatcagtgagccgataacaaactggtcgccgcccagccactccaggcgtttgagggcgagggtcataatcatgccgagcgagataaacagcacaatggcggaatagccgagacctttcccttcccatacggcgctgacaaccgccaccactgccgtcagaacggcgatcgcaatatcggtatagtgacgtccgcgctggtcgcgggaagccggtgtcagtgagcggaaaaacagtactgacggcagcagataccagagccagctgacattcagcccgtgccagccgtaagcggcaagaatttcatctgatgtggagtcggttaaaccataatccaggctccaggacggcagcagggcaaagcccagccacgcgatcagcagccataagaagatggaatcccgtccctgttttgaaggcagagtcagggtttcagacattaaagaatctcccttgcccgtcttcattcaggagaatgagacaagacaatataattattataataaaaacaagaccgcgcggcagaacaccgcgcggcagacaacattacttactcattttgacttcggtgacccacttgttgatcagattcttacgggtttcagcatcaccgtatttatccatatcgtagttgatcagtttcagatcagagagtttcagtgacattggtgaggattcagccgtggtattggtcaggatctggtaagatttaccctctttccagctgatttcctgggcttctttggacagcacgaaatccacgaacagtttggcgttgtccatgttacgggcatttttcaggatactgataccaccgatttcataaccggttccttcacacggggaaattaactccagcggtgcaccgttttccacttccagggaatagtcgtgcaggaagccgataccgatagcggattcaccacgggcggcgttacgcgcaggggcaataccggatttggtgtactgggagatattgctgttgagttttttcaggtaatcgaatgcctgatcggtgccccacagctggtcaaatgtcgccagcgcagtgtaagccgtaccggagctctgcgggtcagcaatctggatttcacctttgtattccggcttggtcagatctttccagcaggtcgggattggcaggcctttctctttcagacgatctttgttcacaccaaaacctaagatgccgacataaaccgcagaagagtagttgcctttgcgtttggccggatcacggaactgcggcatgatctgatctaaattcggggatttgtacgcctccagcagatccatctcacccgcctgtgaatgcggatctaatgtaccgccgtaccagacgtcagcctgcgggttacgtttttccgcttcgatcttggccagggtgctgccggaaccgttacggacaaatgtggttttcacatcgtattttttggcgaaagcctgtgtttcagcttcacacatggcgttggtcgcgctgcagtaaaccaccagacgaccggcggcattagcggatgtggtaacagcagccagtgataaaccggcggcagcgagagcagagagggtcttgagtttcattatcagttcattccttattatagggttctgtcatcggagagtgaaacagagcctgccagatgttcccgcttgctgacattagctatcagcagcggcatcagcagtaatcccgtcagtgccgcggcactggtcagcagggtaaacatgccctgccagccgtaatgtgccatgacctgcgcgagcggccacccggccattgccgcccctaagtaggcgtaaagaccaaggtaacccgttaccgtaccggcggcttttttatggcaatattctgtcgccgccagtccgattaacatttgcggcccgaatacaaaaaagccggtactgaagaaacacgccgccagcagtccgtagtgatgaatcggtattaaccacagggcgctgacagcaataaacaggccgagggaaaacagcagaatcatcggggcgcgctgaccacggaataaaatatccgacccccagcccgcacagaccgcacccagcaaaccgcccagttcaaacagtgacaatgtggcattggcactgagcagattgctgccgtgtgtttcggataaccacaggtttccccagtcattgatcgccatccggatgagataaacgagaatgtaggagaaaccgagtaaccagatcatccggttacataaaattgtctctttcaggatcacccgcatcggcagcggcggggataactgctcctgacgcagttctgacgggtcatgccgccattgtccgacagtcggtaatccttcctcctgtggcgtgccgtgtaaccggctgcacagccacaggccggtcaccatcccgataatgcccggcactatcagggcggtctgccagctgtaacgggttgccagccaggcggtcagcagcggcagggtaatgccgccgaggctgatggagatattccacaatccccaccagaagccgcgttcattgcgcgaataccagtgtgtcaggatgcgcgcgcacggcggccagccccagccctggaaaaacccgttcagtgtccagacaatcagcagggcaggaaatgacaggcaccaggcaaagacaatattcagcacgccggtcataaacagcccggcgcccataaaccagcggtaaccggtgatatcgtggaaaatccccgatacaaattttgagatgccgtaactcaggtaaaatgcggtcgctatcaggccgatatcgcttttatcgagatgcagttctgtctgcatcaccggcatcacaaagttaaagctcttgcgggtcagataaaacgtggcgtaaccgattatcatcgataacatcagtttattgcgccagaatcgataggttttatccatggttttggtctgttttccggccattacgttatgtcccgttcaggctgtaaatgtaatcaatctgtcaataaaaaggatgagagaaggtagtagatgactaggaataagtcttagttttcgtgattttcatcagaaaatgtgggcaggttaacaataatccgggtcccgccggtggtggtcagtgtccagtcgccgccgagtgccctgacccgttcctcaataccgcgcagaccaaagccgccgcggcgtttgctctccgggataccgataccgttatcagagacatggagctgtatcgtgtcacgttgctgtctcagtatgatgaggatgtgggtggctccggcatgcttactgatattatttaacaattcctgtacaagccggtaaagcgtgaacagcacagtttcattttccggcggctgtttcagttcataatgaaactcgcactgaatgccgttttccccgaacgcaaattccgtaatcagatggcgcagtgcattttcaagagacatttcactcagcaccggcggacgcagttcccgtaaaagctggcgggtggactgatgaattttctgtgccagttcattgatttgtgctgccgcacggctgctttgcggatccggcgcggtttttctgaccagcatcgactggatctgaatcgccgtgatgttctggccgatttcatcatgcagttcgcgggcaatcgcttttttgacatcctcttccgtatgcaccagttgctgcatcaggtcacgccgcgcctgtaattcctgctccagccgttcgcggtagcgctgtaaattacgtgacagttgctgttgacggctgatggcaatcccgaggccgataccaatcagtgcctgggtgctcataaacatctgcaattcctgtaaatcggcaaatgcgccgttaaactggcgggcaaaggtgatgatcagactgccgagcagggcagagagcacgccgccctgccagccgtagcggtaggccataaagacattggggataaacaccagcagcaccagcaggcgctcaatttccggggtaaaaaagagctgggcactgagcccggccaggcagaacagaaaacaccacatcagcagcgacgtgcgcagctgcggatccggcgtgccgtaatccaggatcaggcggaaatgctgttcatggagatattcatagatcagatagacaaacggtgtcagaaggataccgccggtcagcgtggtgaggaaaatctgagtcacactcagcggcgtcagcagactgaacaccagggtatgcagcaggctgttgataccgacaccggtgatcagcagtaacaggcgctgccagtaaagggtgtagcgccaccaggtggtctggataataaaggcggtgataagactcagcagcggcgacagcaggatcaccggctgtgacagcaattgttcctgtgccagccagatattcagcagcagctccgccagcagcagggtcggccagaagcgccgccacagcaggatcatcagcgccagccgcaatccttccggcagaaaaaacgctgacagcacactgttctgactgaggtaaaaaccgatgatccacagaccaatccaggtcagggaataggtaaacagcagaaataccgactgtaacagcagacgagcgccgcgcctcatggcctattgtcccgcgataaggtggtgcgccagggcaaaatgaaccagatcgatcgtgctgtcgcactgcagtttgcccagcacattggcgcggtggacatgcacagttttatggctgagttcgagtttatccgcaatcgccctcacactcatcccggccaccagcagatcaaacacctcacgttcacgcggggtcagctcttccagcgcccggttttccggtggtgactgacgcagcgcgcgcatggcatccgcacacagatagcagccgccctgatgcacggaacgcaccgcctgaaccagctcttccgggccgcagcgtttggtgagatacgcactggcaccggcgtccagcgcgctctgcacaaaggccggggtatcataaatactgagaatgatggtacggaaggaggttttgcgctcccgcaggcgggcgagcagctgtaatccgttttcatccggcatggaaatatccatgatcaccacatcaatatccggacgggtcagtgcgggccaggcttccgcggcactggcatattgtccggcgatggtaatatccggctccagtgtcaggagctgggcgaaaccggatcgcacaactacatggtcatcgatgagcgctatttttatcatgtccggacagcgtattatcagcagaaagggatcaattattgacagaggttatatcaatatagcgggtgataatcgaggatattcatacagaaatccgctccccggctgtttttttaccgcttaaccgattcggttgcaggtaaattatttcacataggcaagcaacggcagtgaatcacgggccagtgcggtgcatttgtagttttccggcagctttatatgtttgatgtcgaaatagttctctttattcatttccgccatctgccgggtatcataattgctcatatcccagcggttacttttggcaaacagtaagatcgctttttcgatgcgggcattcggtaaatccccgtagccgcaatcatttttcagataaataaaaaccgcagtcagtccggcgaggtcttcagcctgtgacggcgtcagcgctttcgcgggcagggaaagcagcagggcacagctgaataaagcgtgaatgaatattttcatagtaagtagtttaccggtggcgcctgtcagtttatgtgaagattttaatagttttgtcgcgaatgtcatccgctgactaaagtggtgtaaagcccttattccggagaagggaatacattgaccttgcccttagggcagggtttagcctgcgctataacagaacccaatcattttgtcatagcatatcaccactgatgataaaggaagcatatcatgcaacgacgcgattttttgaaatatagcgcattcctaggtgctgccacgatgctgccggcatggagccggtttgcttttgcggcacaggaacgcccggctctcggtattccgcccctgttaacagcggataatgcccaaaaaatcaccctgaatattcagcaggggaaaatggcgtttattcccggcaaaaccacccaaacctggggatataacggtgatttactgggcccggcactgaaactgcggcgcggtaaaccggtgacggtggatatcgtcaataaactgccggaagcgaccacggttcactggcacggtctggagatcagcggagagcaggatggcgggccgcaggccattatcgccccgggcggcacccgcacggtcagtttcacgccggatcagccggaagccacctgctggttccacccgcacacccatggcaaaaccggtcatcaggtcgcgatgggactggccgggctggtgctgattgaggatgacaataccgcctcaaccggtctgccgggggagtggggcattgatgatatcccggtggtactgcaggataagcgtctgactgcagacggcgaaattgattatcagctggatgtgatgtcagcggcggtcggctggtttggtgacactatgctcaccaacggtgcggtttacccgcagcatatggctccgcgcggctggttgcgtctgcggctgctcaacggctgtaacgcccgcagtctgcggatggccgccggtgacggacgtccgctgtatgtggtcggcagtgacggcggtctgctggccgaaccggtaaaagtgcaggaactgccgatgctgccgggggaacggtttgaagtgctggtggatacatcggacggaaaagtctttgatattgtcaccttgccggttcgtcagatggggatgaccctggcaccgtttgacggcccgctgccggtgctgtccatccgcccgactctcgatgccgcgcgtggtaagctgccggatgtgctggccgccatgcctgccctgatcgacacctcccgtctgccggtgcgtgagttccgtctgatgatggatatgcgcctcgatatgcagggcatgatgatgctgaccgacaaatacggcccgcaggcgatggccgggatgggcatgcacggcggcatgggtggccatatgagcggcgggcatatgggcggaatgaataataatggtatgggacgcggtatgcgcggcggccactgcggctccggtgaggttgatctgatgaacgccaacagcatcaacggcatcccgttctccatgaccgaaagcgcttttgatgtgaaacagggacaggcggagcgctggattatctccggtgtcggcgacatgatgctgcacccgttccatatccacggcacccgtttccgtattctcagcgagggcggacgtacacctgcggcccaccggcagggctggaaagatatggtgcggatagaaggtaatgtcagcgaagtgctggtgaaattcgatcatccggccaccaatgcgcatccgtttatggcgcactgtcacctgctggaacatgaagataccggtatgatgaccggctttactgtcactgcctgaatgtaaaattaaccggtgacaatccgcgtcagtcatggcgcggatactgtttatctgtccgtggtatgctaaactaacgcgctttctgaccggtattaaaccgggtttaatgccgaaccactgaaacagcgtaccgttgacgacaaaaaaatcatgaagaaacacaccttagatacaatgatctccgaagctgagattcagcagcgcgttgccgatctcggcagcgaaatttccgcacactatcgtcacagcaacaaagagctggtcttagtcgggttactgaaaggatcttttatttttatggccgacctgtgccgtaaaattgatgttccgcatgaagtcgattttatgacggtatccagttacggcagcggcacctcgtccacccgtgatgtgaaaattgtcaaagacctggacgaagatatccgcggcaaagacgtgctgatcgtggaagatatcattgattccggcaatacactgcaccgcgtgcgcgacattctgtctctgcgcggcccgaactctgtggctatctgcaccctgctggataaaccgtcccgccgtgaagtggatgtgccggttgactgggtcggctacgcaatcgaagacaaatttgtggtcggttacggcatcgactacgcccagagctaccgccacctgccgtatatcggccatgtgacactgctggaagagtaatgtgtccggttgtgaatataaaaacggcacccaaaggtgccgtttgcttttacggtgatcaggacgacggcatatttgaaagtttggccacggcctggcggtaagccagttccattttttcgcggctgtcagagctgatatccagatcatgcagcaggccgttgttaatcccgtagatccagccgtggatcatcacacgctggccgcgtttccacgctgcctgcataatggtggagtgacccaggttatacacctgttccaccacgttcagttcacacagacggttgatgcggtcctgtggtgcgagttcgcccagcagggagctgtgctgataccagatatcacggatatgcagtaaccagttgttgataagccccagttcggtgccctcaatcgcggcctgaataccaccgcagttgtagtgaccgcagacgataatatgttcaacctggagcacatccacggcatactggatgacggacaggcagttcaggtcggtatggatgacaaggtttgccacattacggtgaacaaacagatcgcccggtgctgcttcgatcagtttttcagcgggaacacggctgtcggagcagccgatccagagaaaacgcggcttttgagcctgtgctaactctttgaaaaattccggatctttttcgtttacagattcggaccactgtttgttattggcaaacagctcttcgatttttttcatcatgacggatagcctgttgcagatcctttagctagaatcttttgtataaaaaatttaaattttaataaattgttattaaataatttcagcaaagaagacaaattgtcaagaaccgattccggttcgcaggtattatttcggtttatattgcacccaaatttctaaattaaaaaggtatttttctgttatgacctatgcactggaaatatcacaattaaccaagcagtatgccggaggcgtgcaggctttacggggaattgacctgaaagtcagtaccggcgatttctacgccctgctgggtccgaacggcgcgggaaaatccaccactatcgggatcatcagttcactggtgaacaaaaccggcggcaaagtctccgtgttcggttatgacatcgataccgacctggttttagccaaacgtcagctcggcctggtaccgcaggagtttaacttcaacccgtttgagaccgtactgcagattgtcttacagcaggcgggctattacggggtgccgcacaaactggcgcaggagcgggcgaaaacctacttaacgcagctggatttgtgggaaaaacgtgatgagcgcgcgatgcgtctgtccggcgggatgaagcgccggctgatgattgcccgcgcactgatgcatcagccgaaactgctgatcctcgacgaaccgaccgccggggtggatatcgaactgcgccgctccatgtggggattcctcaaaaccctgaatgcgcagggcaccacgatcattctcaccacgcactatctcgaggaagcggaaatgctgtgccgcaatatcgggattatccagcacggtgaactggtggaaaacaccagtatgaaagcgctgctcggtaagctggaatcggaaacctttatcctcgatctgggctcgaaaaacccgctgccgcagcttgagggttatacattccggctgactgacacctcaacgctggaggtggatgtccgccgtgaacaggggctgaacggtgtttttgcccagctgaatgcgcagggcattgatgtgttaagtatgcgcaacaaagcgaaccggctggaggaattatttgtgcatctggtgaatcatgatttggaggctgcaaaatgatgtcgctgtactgggtggcgctgaaaacaatctggcgcaaagaaatcacccgttttatgcggatttggatccagacgctgatcccgccggtgatcaccatgtcactctattttattattttcggtaatcttatcggtaaccggatcggtgaaatgggcggtgtcggttacatgcagtttatcgtgccgggcctgattatgatgtcagtgattacgaactcctatgccaacgtatcctcttcttttttcggggcaaaattccagaaaagtattgaggaactgctggtggctccggtgccgacccatgtcattatcgccgggtttgtcggtggtggtgtggcgcgcggtgtactggtcgggatcctggtcacattagtatctctgttctttgtgccgttacagatccactcctggtttatgatcattgccacgctgctgatgacttcgattctgttctcgctggcggggctgcttaacgcactgtttgcgaaaagctttgatgatatcagcattatcccgacgtttgtcctgacgccgctgacctacctgggcggggtgttttactccctgacgctgttacctgcgttctggcaggcggtgtccaaactgaacccgattgtctatatgatcagcggcttccgttatggtttccttggtatcagtgatgtctccctgaccaccactctcggggtactgagcctgtttattgccgtattttatctgctcacatggcgcctgattgagaaagggcgcggactgagaacctgaccctgctttctgataaaaaacccggcatatggttgccgggttttttgtatctgtcctgataattttcctgcgctatgtaattatttttcctcggtttatccccgattaatacagaccttctcccgttcctgcgcctgccaaagctaaatcacagaattagtatgcgtttatcctccggaatatagattaattaaattaatgtgtttatcgtgtgcgggccggtaaaaaccggctgtgtactgatgtttaaggataaatttcattctgtttcattattacattcggagatatttttatgggtatcgctacatacggcagggaagacggatggtcgtttatcgatgatgtgttaagcagtccggggcggggtaacggacgctggattaataataaaatttcatatgatgcctttgaggccggagattacattgccagatccaataccggctggaatggcgcgggtgtgctcgggcagcccgcggaagtaacctattcattcccgacatgggagggaatgtattataacggcgcaggaaacaccggcctgaagggttttaatgactatcagaaagatcaagcccgtttatcactgcagtcatgggctgatgtggcaaatattacctttaaggaagtggatgccggccggggggaaatctataccaatatcacctttggttatatcaatgataaatacactcaggcctatgcctggctgccgcacaccaaagattattcgggtgatgtggtgaccgattcgcggggttttgatgtctccggccagtcctggtacagctcagaacccggggcgctgaatgtgacaccggtgaccggaaactatggccgcctgacatttacccatgaaatcggtcataccctcgggttaaatcatccgggcaactataacgccggtcaggggcgtccttcctataaagatgcggattatgccgaagatacccgtcagtacagtgtgatgagttactggagtgaaaaaatcaccggtgcggatcacaaaggctactacgcttccgcgccgctgctggatgacattacggcgattcagaaactgtacggtgcaaattataacatccgcactgatgacactgtttatgggtttgattccaataccgggcgcgattattactctgcccaaaatgccacagataaacttatttttactgtctgggacggcggcggtaatgacaccctgaatttttcccgttataagcaggatcagaaaatttcgctgcgtgaaggcgatttttcagatgtcggtggcctgaccggcaatgtgtcaatcgcacacggtgtggtgattgaaaatgccttcggcgggcgcggaaatgatgtgattatcggcaatgatgcagacaacatcctgatgggcaacggcgggaatgatgtgctgtacggtggtgccgggcaggatcagttgtggggcggtaccgggaacgatattttcgtgttctcggcggtgacggattccctgtatgaccatccggatcatatccgggatttttcaaccggcctggacagtattgatttacagggactgaatcagaacagcgccggggaaaaattcatttatttcaccgatgaatttaccggtgcggccggtgcggccgagctccggtacaatgaagggctgaacctgacagagttgctgattaatatcagcggagatccttacaactatgatttcagagtggatatcaccggccaggtgaacgttcacactgactttatcgtttaacacagcaggcgggcgcggccggtgcggcgtccgcagtattcaggaattcactatgcaaatatcccggccattattgttttcgttgttgctatctgggcagagcgcggcaatcagccagaaaattcccgctgcagaagcgcttcaggggccctggcagtttacggaggacgggcagacgctgccggtcggactcacggcggttcccgacagcacaacagacgggtttcagctgcatttcatggcacagccgcagataacggcctggcgtccggcgccggacggcattgcgtttcttactgcagacggcaccacacgttatttcttttccgccgaagcccccggccgttaccgcgcggaaatctggcatgaaaatggcgcctgtcttctgaaagagtaattacctctcttttttacctggtgaacaatattatcaatcccggcagacatgccgggcggagtccctgtatatgctttccgggaaaaccagaaatgatattacggcatttattgccgcccgcaagtccctgtttacctcactggcattattcagcgggctgattaatctgctgatgctcgtgccgtctgtgtatatgctgcaggtgtacgaccgcgttctgccctccggcaatgaaatgacgctgctgatgctgacgctgataatggccggattactggcactgaccggcggtctcgattatctgcgcaatatgctggtgatccgcatgagtaaccagttcgatctggcgctgaatacccgtgtttatgacgcggcgtttcaggcaaaactgcaccgcacgccgggccaactgccgttacaggcacagaccgacctgatgatcctgcgccgttttatcaccggcaacggtatttttgcttttctcgatctgccctggttcccgctttatctgctggtgattgccctgtttaatccgtggctgggattgtttgcctgtggcggtgccgtcgtgctgatcgcgcttgcgctgctcaatgaacggctttccgggccgccgctgaccgctgcaaaccgctcttccgccgccgcacagggcatgcagggcagccattttgcccatactgaacccgcagaggcgatgggaatgcagcagtatttgcgtcagcgctggctgaaccagcactgcgacagcctgaagaaacagacacaggccagtgattattcagcaaaaatcatgacaatcaccaaaaccatccgcctgatcctgcaatccctgatgctggggctgggcggctggctggcgctggataataccatctcgccgggcatgatgattgccgggtcgattctgctgggacgcgcgctgtcaccggtcgaacaggtcacaggcgtatggaaaagtgccaaagagagcaggctggcgtatcagcggattactgcgttgctggcggctcacccgcaaccaccgcagaagctggcactgccggttccgcagggtaatttgtccgtctccgtgatgcaggcgggttatcccggcgctgacacaccgcagctgcacaatttgcatttcagccttgtaccgggggaggtgctggggatcatcggtccgtcaggtgccggaaaatcggcactggcaaaactgctcgccgggttatggcctgcaacacgcggggctgtccggctggacggggcagatctctgtcagcaggacaaagcggtgtccggcaaatatatcggttatcttccccaggaaatcgcgctttttcccggcacaatcgccgataatatcgtccgtttcgatcctgatgctgatccggaaaatatcatccgtgcggcgcaactggcacaggtacatgaattgatcctgcaactgccgcagggctatgaaaccctgaccggggcagacggtaccggcctttccggcggtcagcggcagcggatcgccctggcgcgggcactgtacggctcaccggcactgatcattctggatgaacccaatgccgcgctggatgatgccgggctcagtgcgctgttagctgccatggatacgctgaaaaaacagggaaaaaccattgtgcttattactcaccataaaccgctgctgtccgtgacggacaagctgttgctgcttgcaggcggacggatgcagctttttggtccggcggagaaggtcattgaaacacttaataatcaggcgggtaaaaataatgatcactaaatggttgtccgcggcgccgggggtaaaaaccgataccggcgggtatcagcgcgcggggaaatatggggttgtcctgggccttgccggttttttgttgtgggcgggatttgcaccgcttgatcagggcgttgccgcatcaggaacggttgtgattgccggtaatatcaagcaggtgcagtctccggcggatggcgtgatttctgagatttatgtgcaaaacggccagcgggcggaaaaagatcaggtgctggtacggctgcgtccggtgcagtctcaggctcaggcagtatcgctggcagagcagctcgacagcacactgctgatacagcggcggctggaggcagagctgcgtggtgaagcggcatttaccccggcggcggatgatgtcttttatgcgccgcccgcgtatggccgggcacagttacaggcgcagaatgcactgcttacagaccggcggcttgaactggagagtgagattcaggcccgccgggtcacggtcgacggcctgacgcagcggcttatcactctgcgggagattgcccgcagcactgcgcaacaggcggacagcctgacggcacaggcggcaaatcttaaatcgctggcggatgaggggtatctgccgcgccatcgctatcaggaaattcgccgggaaagtgcggcactgcgcaatcaggcggatgacacccggttacagataagccgtgcagaggaagaaaaagccgcgcagacagagcagatcacacagcggcgggcagcttttcacagcgggatccgcgaggagttatcgcgcctgtcagttcagcgcagtgagctgaaaaaacaacagattatcgaaaacgatcggctggaacagcatgttatcaccgcgccggtgaccggcactgttatggatgtgtccgtgtttaccgcaggcggtgtggtgcaagccggggaaaaactgatgtcagtggtgccggcgcagcagacgctgattattgaaggcaaattatcaccacagtggatagataaagtcgctcccggtcagagtgctgatctgctgtttactgcattcaatcagaacctgaccccaaaactgcgcggcgaactgacaatgatctccgccgatcgtctgataaatccggcaaacggggaaccttactatcagatccagatcgcggtgccggaaatggcggcggctcaggtgatcaaacccggtatgcctgctgagatttttatccgcaccggtgaacggtcactgctcagttatctgtttaagcctgtgactgaccggttctttttcgcgctgaccgaggagtgatccgtatgcattctgcaaaacacctttttgcggcactgttgtgtctgttgtccgccggtgtgcaggcggtgaccttgtctgaactcggtcagtccgcactgaacaatgatctgtcattccgtgctgcgggtaaggcttatgaggcggaacaggcagaggctgccgccgggaaatcgcacctgctgccgtccgccgggctgagttatcagaacacgccgtataaccggctgacacagcgggcaccggtgacctctcagcgacattacagcagccattcccttaatctggtggtgacgcagccgctgtttgattacacagcataccatcagtaccgggcagcacagatacgcggtactgccgcagagagccgcttgcagatacaacaggcagagcttatcaaccggctggtttctgcgtatctgaacctggcttgtgttctggaaatacagaaaacagaccggctccggctggcgctgaataccgctcagctggcggctgcacagcgccttttgcagctcggggaaggaaccgtgacggaggttgaatccgcccgtgcccgtctgcggcagcgtcaggcgcagatcgcggaaacagaagcggaaagtctgaatgcgttgctgatattgtctgatcttaccggcctggcgcagttgcggatgcaggatcttccggcactgaaagcgggggatttccagctgccgtacctgaatgacggcgactatgcggatcaggaacagcagatgctggcggtgcatccggaaatcaaagcggcacagcaggaaaccgcgctggcaaaagcggcggcagaggtacagcgcggggcatttatgccatcagcacagctctttaccgcctggtcggatacccaatcggacagcaatgatactgtcggtcagcgctaccgtaatctcagtgccgggattcacatttccgttccgctgttcagcggcggaaaagatctggcggggatgcgtaaggtatctgctcagattcagcaggcgcagtatgaacaggatgcactggtacagacactccggcgtgacctggcgcgtcagtatcaggtgttccgccacagcggcatacagctggcggcgctggagcaggccgcagcggctgcgcggttacaggtaacggcggcggaaaaagggtatgcggcggggcagaacagtcagccggaggtggcacatgcccgggaacagtattatcaggcggagcaggagctgataaaagcccgctatgacgggcttctggcctggttccggctgcgtcattacagcagcacgccggaaaccgggcttttcaggcagattgaggactattttacagtgacggagaggatgtatcactgccggcagggttcggcatgttgacatgcaggcagtcgatcaggcggatatttcccagccaggcggaggccagaatcaccgctttctcactgttgacgcgcaccgcttccaggtcatcagcatcacagatttccaggctgatgtcgcggaatccggcacggcttaaatcgtcacgggcattatccagactttcggcaatagcactcgggcgttcacggatcatatccgcgagggtttgcataacctgatacagacgcggtgccgcctctttttcctctttattcagcagagtattgcaggagctgagtgccagcccggttttttcccggacggtcggaatggtggccagtgcgatgtcataattcagatcacggatcagacggcggatagtcaggaaacgcggatggtcattggtgccgaagaaaacgatatccggctgcaccagattgaacagcttgcacatcacggtggcgataccgcgcagacgggtgcgctgatgcggctcatcacactgactgagcagcggcggtaccatcacctgagtctggtgagccaaaccgtgcggatagacatcactgaccgccggggcatacaccagatccacctgtgctttgctcagtttttcgcagtctgcctggagagtgcgcgggtagcgctgcaaatcatcttcgcgggggaactggagcggattcacaaagacagacaccacgacaacatccgcctggttacgggcttcttttatcagtgccaggtggccgtcatgcaggtttcccattgtcgggataaacgcaacacgtttgccgtcagtccgcagacgggcaatctctttgcgcaggatcagcgcagtttcaataatccgcatcagtgtctccttgtctgtctgttgagcagaaagttcagcgtaccggctctgatgatgaccagaggccaagcccgttttccggggtgcgggcaacaaccgccgcaagtggttcgccgtccggcagaatcagcccgggggcgatttcagccagcgggtacagcataaattcacgcactttcaggccgtaatgcggcacggtcagccgcgcatcactgatgaccatatcaccaaacagcatgatatctaagtctaacgtgcggggaccccagcgctcatccttgcggacacgtccgtgcgccagttcgatagcctgggtggcatcgagcagctggtgcggtgtcaggtcagtttccagcagaacagccgcattaagataatcaggctgtccggcaggtcccatcggcgcggtgcggtaaaaagcggagtggcgcaccaggcggctttgcgggacagctcccagcgcggcaatcgcccggttgacctgatccagcgggtcggcaagattactgccgatcgcaatatagaccggaatcatgattcactgtttccgttaccctgacgggcacgcggatggcggcggcgcgggcgcggacggcgtttgaccggatcactgcccagttcagtcaccattgagcgctgctgcggggcattcgcctgctggaaatccgcccaccagtgagccaattcctgtaactcatgacggccttccacattcgcacgcagttcgagcagatcaaaggcggcgcggaatttctgattttccatcagacggatcgcgcgtttaccctgacggcgcggcagacgtaactgtaactgccagatatcacgcatggtggtggtcaggcgtttcggaatagcaatcgcgcggcactgttcatccaggatgtcattaatggcaatcgcgaaggcttcgtaataggcgagcccgctctcctgggtcagtttttccgcatgttcgcacagcggataccacagcatcacggcaaacaggaaggccggattgacgcgctgatcgttatgaatacggtagtcggtatttttcagtacctgatccacgatacgggacagcggggtgtccgggttctctttcagcggcccggcaaccagcgggaacagcatatccagcagatcgtattcacgtaataattcaaacgtacggtgtccgtcaccggcctgtaataacttgagaacttcctcgaacagacgcgcaggcgggatatcacgcagcagtgtgctcagcgtgcggataggcgcggcggtctccggttcgatggtcatatccagttttgcggcaaaccggatggcgcgcagcatacgcaccgggtcttcgcggtaacgggtttccggatcgccgatcagacggataatgcgctgctgtaaatccgccagcccgccgacgtaatcacggacggtaaaatcagccacgctgtaatagaggctgttaatggtgaaatcgcgacggacggcatcttcttcaatggtaccgaaaatattatcgcgcagcagcatgccgtttttgccctgctgagagcgggctttgccgtcatcagccggttcgttattgtcatgcgggccacggaaggtcgcgacttcgataatatccgggccgaacataatgtgagccagacggaaacggcggccgaccagacggcagttgcggaacagttttctcacttcgtccggcgtggcattggtcgcgatatcgaaatctttgggtttgcgctccagcagcagatcacggacaccgccgccgaccagataggcgtcaaaacctgatttattcaggcggtacagaaccttcagcgcattctcgctgatgtcctgacgggaaatagagtgactgttgcggggaattaccgttgcgctgactgtcccgctgttatccatattttttgccggttttttgcgtttagcggcaggacgcgcgggggaagcctcacggggtgacggattctgcggcgtatggtcagcattcggggccggcctttcactggcagcctctgtgcaatctgccttattctcgcgggaaatcagactgcgacagaactttgcgactcggtttaaaatggtacacctctgtataacaattaaatgatctaaaaaataagcgactaataatatcgtacacttggttttttgagaatgccttagcccggatattgcggaattattccctgtccgtcaccacatcatcacgcggtacggccgtaatatcccagttccgtacactgtatgccagcagttcagtcagggaaagcgacagcgggtccgtttccggcagcggctgccggagcacctgcaacgcctgccataacagcgggcgcggatcactgagcggcaccggggtggcatgattttgcttggagagtttacgcgccgccgggcccagcatcaacggcaaatgcagataatgcggctccggcagcctgagctggcggtataatgagagctgatgtgaggtgggatacagtaaatccgcgcctctgaccacctctgtcacaccctgataatcatcatcgagcaccaccaccaggttataggcaaacagcttatctttgcggaagataatgatatcttcctctgccgtggcgttatccgtaaacacatcgccccgcaggccatcggtaaaatggtacaccggatgcgtcctgataagccgcagtgcggcgttatccggcggcagtccgcgctgacggcaggtgccggggtaatggccgccgctgtcatggacatcatgccgtgtgcaggtgcagtaataacacagcccggtggctttcagctgtgcaatcacgtcacggtaagcatcatggcggcgcgactgatacagcacaccgccgtcccagtgcaggccgtaatggtcaagaatacgcagaatggcatccgcagcacccgggacttcacggggcgggtcgatatcatcaatacggagaagccagcgtccgccgaggtgacgggcctgaagataactccccagtgcggtcaccagagagccgaaatgaagtgcaccggaaggtgatggtgcgaagcggccggtataaccgggcgctgagccggcagaatattccgtcatctgtagtggcataaaaacggacggcgctgtcaaagcgccgtctgtggtaaatctgtcagcccgccatctgcttttcgcggatttcagccagcgtcttacagtcgatacataaatctgcggtcggacgcgcctctaaacggcggataccgatttcaaccccgcaggactcacaaaaaccaaaatcgtcgtcctcaacctttttgagggttttttcgatctttttgatcagtttgcgttcgcggtcacggttgcgcagttccaggctgaattcttcttcctgagcggcacggtcaaccgggtccgggaagttagctgcttcatcctgcatgtgcgtgacagtgcggtttacttcatccctgagttggttgcgccatgcttcaagtatcagcttgaaatgggccaactgggcttcgttcatgtattcttcgcctgccttctcgtgatacggctccacgccggcaatggcaagaatgctcagggacgaggttttacgtttttgcccttcttgcataatgcttctcctacacacgcatgtctgacaatatcccttagaggggaaaaataggccgctatagatagcagatgattatggataatgcaacccttgctttcattagttttgtaaggtgtgaagaacagcgtgtttattcactccgcaactcacaaaacatcctatttattattaaaaaaattgatattcaccccatgaatgcaaagggtatcttttctccggcagtgatgccgtccggtgtcatccgcattctgtaacaaattacttcagttccggactgtgatgcctgctgcaaaagtgatgaatattttttatcaatgtgtgctgcgtccgatacggcctcaatccctgaatgcagtacagcaaaaaacagaacagcacgatttcccgcttcagcaattgcttgtaactcacgtaagtgtttttgtccacgtaaagttacggtgtcgggaaaataaccgtgtccgttttccagcagcgtgacggatttcacctcgacataacagggctttttctgcggatcggtcagtaaaaaatcgacccggctgttttcactgccgtatcttacttcctgtgccagcgtctgatacccggcaagttccgggattcggttctgcgcaatcgcctcagccaccacccggttcgcctgcattgtattcacacaaatcagatgcccggcctgtgtctgcgtcagttcccagctgtgcggatacttgcgctttgcattggcggattcggaataccagacggtatcacccggcgtggcacagcctgtcatcgcgccggtattagcacaatgaatggtgatggtgcgcccgtcctgcgtgataatatccgccagaaaacgtttataacgctgcaccagcgtgcccgcctgtaacgggggatgaaattccatcgtaactcctgtcaatgtgactgcacttttcagggggcggcaatgctacaatgttgcgcgtcgaaagttaagcagataatgatgaggtttttgtgacatattcccccgtttgtaacatttatccggcactcagtacggcactgaaaagtgccccgcaggtgttgttacaggctccgaccggcagcgggaaatccactattctgccgttgctgatgctgaaagacgaatctgtcaccggacggattatcatgctggagccccgccgtatcgcggcccgcagtgtggcgcaccggttggcatcgcagctcggggagcgtccgggggaaaccgtgggttaccggatgcgcggtgaaaccaggatcagtgcagccacccggtttgaggttgttacagagggaattctggtcagaatgttacagcaggatccggaattatccgaagtaagcatcattattctggatgaattccacgaacgtaatttgcaggctgatctcgcccttgcactgctgctggatgtgcagtcctcactgcgtgatgatttgcgtctgctggtgatgtccgcgaccttagataatgaacagctgctgtccctgctgccgcaggcggaggtgatcacagcggaggggcgggctttcccggtggagagacggtatcagccgctcagtgcgcatcagccttttatcagtgaggtggcccgggcggtgttgcagctgtatcagcaggaggaaggctctgtgctggtgtttctgccgggacaggcggaaatctgccggttacaggaacaactgaccggtaaaacggatgcggatactcttatctgcccgctgtacggcgcactttccctgaaagaacagcagcaggcgattgaaccgccgccgcccggtatgcgcaaaatcgtgctggcgaccaatattgccgaaaccagcctgacgattgaaggtgtgacgctggtggtggacagctgcctggagaaaaccgcgcagtttgatccgcgcagcggactgaccaggctggtgcgcagccgcatcagccgctcatcgatgacacagcgtgctggtcgcgccggacgtctggcgccggggatctgtctgcatctgtgcggacaggcggaagccgaacgcgctgcggctcacagtgagcctgaaatctgtcacagtgatctcgccgggctggtgctgaacctggcgcagtggggctgccgtgaggtctcacagcttgcctggcttgataccccgcctgccgtggcggtacaggtggcgaaaaaactactgacagaaatgggctgtcttctgcctgacggcggactgactgccaaaggtgaggcaatggccgcttccgggacagagccgcgtctctctgcgttgtggctttatacccttaatgaagaaccggcacagatatactatgctgcccggctgattgccgcgctggaagagccttcccgcgaaggtaacggtaatctgctgcatgatctgacacatccgtccgcacgatgggataagcgggcgcagcagctgttacaggctgccggtcagccggtcagaaaaccgtctcatgatccggacaacggctggctgtgccgcaccttattacagggctttccggacagaatcgccgggaagcgcgggcgctccggcacatttttactggcaaacggtaccggtgcggtaacagatgaaagcagcccgctcagcaatgaagccgggcttatcgccccgctgatcctgcaaaatgagcagcaggctaatgcacggatcctgaaagcggtgccgtttgaattatcacagctgacagaaatggcaccgcacctgctgaaaaaagaaaaccgcctgacccgtgatgaaaacaaaggcagttggcaggcgtggcaggcggttacctgcgggcagctgattattgagcggaaaccactggcggcaccgtctgatgaggttgtccgcgacgcgctgctcagttggatccgcgaacagggtttatccgttctgccgctgaatgaagcctgtgagcagttacttatccgccagcagctggcaaatgatctgtttccggaacagccgctgccggcggcggataatgatacactgctcgccgggctgggatcctggctgtcgccgtatctgaccggtgtgcgcaatcagcagcagctggcaaaactggatttatacggcgcgctgcgtcagcggatggactggtcgcagcagcaatggcttgatgcacaattcccgcgtcattttgaagtacccaccggcacccggatccctgtagaatatgcggcggataaaccgccggtgatggcagtccgcattcaggagatgtatggtgtgcgtgaaacgccggtggtggcgcagggacggctgccggtgacggtcagcctgttatcgcccgcacaccgcccgatacaggtgacagcagacctgaaagccttctggggcgggagctaccgggaggtgcagaaagagatgaaagggcgctatcccaaacatttctggccggacgatccggcaaatgcacagccgacaaagcgtgtaaaaaagtttatgtaaatgcaaagatagtctttgtttaacggatttttactgtgtctgttgccggaatcggcgacaatagcaactgatgaaataaccgcctgtcccgcccggcacatgattgtgcggcagacagactgacgggagagaccatgtctgattttgatcgtgaacccaccggccgcaggggcagcaaggcttctgccggcaaaaaaagagggcgctcagaccgccgtcgccgccgggatgaggattatgacgatgatattgaatacgatgatgaattcggtgatgacgaaccggatgatgatgattatgacgatgaagaggatagtccgcgcatgagtaaaaaagggcgcaaaaacaagccgcccaaacggcgctggcgctggttctggttcctggtcaaactcggcattgtgatggctatcctgctggggatttacggcgtttatctggccggaaaaatcagtgaccgcctggacggtaaagtctgggatctgcctgctgcggtttacggacgtactgtaaacctcgaaccgggtatggattacagcctgaatgagatggtgaaactgcttgaaggtatgcagtaccgcaaagtcaccaaaatcacccgtgccggtgaattttccgtgaccggtaatactattcagatgctgcgccgcccgtttgatttcccggacagtaaagaagggcagattaacgcccgtctgactttcggcagcagcggactggaaaaaattgaaaacgtggataacggccgtgaattcggtttcttccgccttgatccgaaactgatcaccatgatgcagtccgcgaatggtgagcagcgtctgttcctggcccgcagcggcttcccggatgaactggtcaaagccctgctggtgacggaagaccgcaatttctatgagcatgacggtatcagcatcacctccatcgggcgtgcccttctggcaaacctgacggcgggacgtgcggttcagggcggcagtaccctgacacagcagctggtgaaaaacctgttcttatccaatgagcggacactggtgcgtaaagccaatgaagcctatatggcgctcattatggattaccgctacgacaaagaccgcattctggaactgtatctcaacgaagtatatctgggacagagcggggatgagcaaatccgcggcttcccgctggcgagcctctattacttcggccgtccggtgaatgaactcagtcttgaccagatagcactgctggtgggaatggtgaaaggggcatcggtctacaacccgtggcgtaacccgcaaaatgcccttgagcgccgtaacgtggtgctgaaacttctgcaaactcagggcggggtgatcgaccaggaaatgtatgatgtcctgagcgcacgtccgctgggtgtgaaagagaaaagtggtgtgatcacgccgcagcctgcatttatgcagctggtccgtcaggaactgcgcgagaagctcggcgataaagtggatgatctgtctggcgtgaaaatcttcaccacactggatccggtttcccaggatgcggctgaaaatgccgttgaggaaggcgtgaaagccatccgtgcagagcgtaaaaaaccggagctggaaggggcgatggtggtggttgaccgcatcagcggcgaagtccgcgcgatggtcggcggctcccagccacagtttgccgggtttaaccgcgctatggcagcggaacgctctatcggctcgctggcaaaaccgatgacttatctcaccgcgcttggtattccggacacttatcgtctgaacacctggctggacgaccagccgctgaccattaatgttccgggcggcggcggtacctggtcaccacgtaacgacagcaaaaccttcagcggccgtgtgatgctggtggatgcgctggcgcgctctatcaacgtaccgacggttaacctcggtatggcggttggtctggatgcggtggcggatacctttgtccgtctcggtgcgccggcgaaaaatatccagaaagtcccggcgatgctgctcggtgcggtaaacctgacaccattgcaggtctctcagctgttccagaccatcggcagcggcggtaaccgcgcgacactgtccgcactgcgctcggtgattgcggaagacggcacggtgatttatcagagcttcccgcaggcacagcgcgcggtggctccgcaggcggcttatatgacgctgtacggcatgcagcaggtggtagaacgcggtaccgcggcccgccgtctgggatcgaaattcggtaaataccatctggccggtaagaccgggactactaatctgatgcgcgacagctggtttgtcggtatcgacggcaaagaagtcaccgtatcctggatggggctggatgataacagcccgtccggcctgtacggcggctccggtgccctggtgctttatggccgttatctggacaatcagccgccgctggcactgaacctcactccgccggaagatatcgcagagatgtctgtcaatgcggacggcaattttgtctgcaacggcgtgggtgtcacccgggcattaccggtctggacaacggacgcacaggcgctgtgcggacagcaggcaccggctcagcagcagggcgaagaagcccccggctggctgaaagagatgttcgaacagtaatcccctgttctgcgaaaagcactgaaaacccgccgcaaggcgggttttgtttttttagtgaccattgcggattaggtgtaatggcattatgatcaagtatgcgatataggtccggaggaaaaatgaaaaacagtaagaaaacgccacagacgctgataatgcctgatagtgaacagttaatccgggctgttgtaacatctacagcggttgaaaccggacaggagcctcagaaactggctgaggctctgaaagaaaaacgtgaaaaatatgcccacctcagactggctgtttagtttttgctgagtgcctgattaacctaatatttcattggttcataattcagatttaatgctgcgtggatagcagcaatataatgtgccggatgttgtttccagcagctgtaatccagaggcggtaacccactctgaactgccataacatcagcgataaggcgggacaaacggccatttccttcacgaaacggatgaatcagaataaactcagtgtgtacgactgcgatggcttcagttagttgttctctggtcattcctgtacagggcgtgtacctgctcagaaattctttttcgaattgtgaaagcaaccccgcaattctgcctgcaggcgcgaagatgaagttatctttgctgatattaacagtccggatttgcccggcccagtcatagatattccccagccactgacggtgccattgttttattagtggtacggtaatttttccggcaggaaatgcagtactgaaaacaatcttataaagcttttccagcagtactaattcggcatcattaatatcattggtttcagacaactgaagcttgttttccaaaacatcatcacctgaaccggcagcaaatttcccttcactgtttgatacatgatacttattcattctgctgatttatccgttttactgtgtggtatgttttatcccggacaaaaattaaaccataaaaaaactgcgccgaattcgttgcattgaacgtttgcggcgcagttcacagttaaaagccggtgacgattacttcttctgcttcgcttcctcagcagcttcttcggcttccacttcttcataccagcgcgggtgatgtttcttcgcccagcggcggctgactttaccttccaccatacctttgatcgatcctttcacccagaaggccatatacatatggatcaggatggcgtggatcaggacgatagccgccgttgcgtggatcagcagactccagcggatcatccacatcgggaagtagtgtgcaaagtacggacgccagatgatgatcccggtggcaagcaggacgaagatcatgctcataatgctccagaacatcattttctgtccggcgttgtatttaccgacacgcgccacatgatgctcattgcctttcagcacttcgataatgtttttaatccacggcagatcttctctgtccgggatgttgtgcttaacgaagcggaaaaacataaacatcagcacgacgaaaatcagcacaccaaagaacgggtgcagaatacgccccattgccggcgtcccgaaagtttccgtcagccattgcagtgtcgggaagaacagcgcaataccggataaggagaccaggaaaaagcagatcaccactgtccagtgacaggcacgatcaataaatttcgtgcggacgatcattttgcttttcttactcatggtgagtttcctcctcttcctcatcgtccgtctctttgttcgggccgatccccacatagtggaataccagtccggcaaaggtggcgataaacccgatagccgacagcggtttcagtactcctttccagagatcaatcggtgtatcaatctgcggatctttcggcagtccgtgatagagctccggattgtccgcgtgctgcagcacatacatcacgtgtgtgccgccgacaccgtccggattgtagaccccggcattggcaaagccgcgttttttcagcttttgcacgcgctcgtccgccacttccagcatgtcttttttggtaccgaaatggatagcaccggtcggacaggttttcacacaggcaggctcctggcccacgctgacccggtcaacacagagtgtgcatttgtacacccggttatctttcggattcagacgcggaatattgaacgggcaacccgcaatacagtagccgcagccgatgcagtgttctgactggaaatcaacgataccattggcatactgaataatcgcaccggcagacggacaggctttcagacagcccggatccgaacagtgcatgcagccgtccttgcggatcagccactccagtttgccgttctctttggtttcgctgaaccgcatgacagtccaggatttggcgctgagatcagtcgggttatcataaaccccggtacagaacccgacctcatcacggatgtcattccattcggaacaggccacctgacaggctttacagccgatacaggtggacacatcgatcagcttggcgacttcaaacttgtcgtcacgggcctgaggaggcggcgttatgctgttggtcgcagaacgtttgataatgtcttgagattgcatggacataattcctccttacgccttctcgatgttgactaagaacgctttgaattcaggcgtttgcgagttggcatcaccgactcccggcgtcagtgtgttggtgataaagcctttttgggcggcaccctcaaaaccccagtggatagggatcccgacagtttcgaccggcttaccgtccaccatcagtgtctgcagacgcggcgtgaccacagcaaccgcgcggataaagccgcgtttactgctgactctcactttatcgccgctgctgatccctttggctgcgcccagggtttcactgatttccacaaactgttccggctgtgcgatagcattgagccgcgcatgtttggtccaggtatggaaatgctcggccaggcgataggttgtgcccacatacgggaattccgtgtgactgcccagacgatttttgtcgtcctcaaagatacgggcggccgggttggatatcacccccggatgcagcgggttggtaccaatcggcgtttcaaacggctcatagtgttcagggaacggtccttccgccattttatcgatggcaaacagacggcctaaaccttccggctgcatgataaacggtccggtaccggcttccggtgcagaggcgttgaagtcagggatatcgttaccgacccacttcttaccgttccactcgataagcacgcggttcttatcccacggtttaccctgcggatcggctgaggcgcggttataaataacacggcggttcagcggccatgcccaggcccagccgagggtgttaccgatgccggacgggtcactgttatcccgtttcgccatctggttaccctgttctgtccagcagccggtgtagatccagcaggaggacgcagttgaaccgtcatcacgcagcagcgcaaaggaactgagcagctcaccttttttcgcctgtaaattgccgttggcgtcatacagatcttcaagggccacgccgttgttctctttggcaacttcgtcggattccggattgaacggctgcttgtaatcccaggacattttcatcagctgatcaacaccctgaccgccttcctgctgatacagttcacgcattttccacagaataccggcaaggatctgaccatcggtacgggcttcccccggggcatccgctgctttccagtgccactgtaaccagcggccggagttggcaatcgagccgtcttcttccgcgaaacaggtggacggcagacggaacacttcggtctgaatggatgtcggatccacatcattcatatcaccgtggttttgccagaaacttgcggtttcggtgctcagcggatcaacggttaccaggtatttcagtttgctcaggcaactgaccactttgtttttgtccgggaaggacgtgaccgggttaaagccctgacagatataaccgttgatttcgcctttgttcatcatgtcgaaatacttcagcacgtcataagcctgatcccatttcggcagccagtcatagccccactggttctctttggttgcttcatcgccgtagaaggatttcatcaggctgacgaagaacttcggatagttgctccagtagttgacctggcccggcagcgtggctttcggcgtattggctttcagatagctgtcgatatcagtctgtttctcagacggcagggtcagataacccggcaggctggtggagagcaggcccaggtctgtcagaccctgaatgttggagtgaccgcgcagggcgttcacgccgccgcctgccacacccatgttaccgagcagcaactggatcattgccatggtacggatgttctgcgcgccgacggtatgctgcgtccagccgagggcatacaggaaggttgccgcacggttggccgggctggtggaggccagaatctcacagactttgaggaaatccgcctgtggcgtgccgcagattttttccaccatctccggcgtataacggctgacgtgttctttcagcttattccacacacactgcgggttctgcagggtgtcgtcacgcagcgcatagccatcttcaccgaactggtaattccaggtggttttgtcgtaacggcgtttttcagcatcgtagccgctgaataaaccgtctttgaatgtgtaatcctcacgcaccagtaacggtgcattggtgtaatggcgcacgtactcgtcgtggaattttccgttttccatcaggtacaggatcacgccggaaaggaacgtaatgtcggtcccggaacggatagggatgtagtgatccgccacggaagcggtccgcgtaaagcgcggatcgataacgatcagtgtggcatcattgttgtttttcgcttccatcgcccagcggaaaccgacaggatgtgcttccgcagcattcccgcccatcaccacaacgacgttggcgtttttgatatcaacccagtggttggtcatggcaccgcgaccaaatgtcggagcaagacttgctaccgttggtccgtgtcagacacgcgcctggttatcgactgccagcatcccgagggaacgggtaaacttctgggttaacatcccggtttcgttgctggcggcagaggcgcagagcatcccggtggtcagccagcggtttaccgtggtgccttcgctgtttttctcaatgaagttggcatcacggtcggctttcatcagacgggcgatacgctcaaaagcgtcatcccagctgatgcgctgccatttatccgagcccggcgcgcggtactgcggataacgcagacggctttcactgtgaatataatcgagcagaccggcacctttcgggcataacgccccgcggttgaccggatgatcagggtcaccctcgacgtggaaaattgctgatttggcattcatggcaccatcgcccatgctgtaaatcagtaatccgcatccgacggagcagtaggtacaggtgttacgggtctcttttgaacggagtaatttgtattcccggacattagacattgctactgacggcataaagcctaaagcggcggctgttgttccggcgagaccgccggcacaaaccttaaagaactgtctgcggctgaaattcatcgcatcctcttttttatttatttgtaaaaaatcgtgaggagaatatcagcaaaggttgaatttatattgcctgaaatcaatgaaagtgaactttgatgtttaataattattaattgaagtttttagtgttttgtaaataatcacaaagtggtaggggaaatgacgtattttgattcagatcaattaaaaaaataagcctccggagaaaaaagaaaaataagtcaaatttcaccggcggcacataataagattatatttgttaaaaaacaatttaaaaatggcggatatccgaatcatcatttttaaaatgagaaggggattgccccatctgttttttaaacataatcgagaatgcccccgcactgttgtaacccagctcatacgccacttcggtaatcgattttccggacagaatatgagacagcgagttcagaagacacgcctgctgccgccattctgaaaatgacatcccggtctgggtgcggaaaaaacggctgaaagagcgctcgcttttgtgcagctgttccgcccattcccccggttgtgaggtgataaccggtttgcgcataaactcacggcacagacgaccgagcttctcatcacgcgggatcggcgcgaaaaacggcagcgggggcatacgcgccagctcgcagaggatcagctgcatcagcacaccgtcacgcccctgaatatcatattccgccgggctatccaccgcctccagcagcagctggcgcagcagcggggagacactcaccacttcacaactgacggcgtggcgcggctttgctgccggttcgatatacagactgcgcgtgctgacattcagcatccgggtttcatgagcgacctgttccgggatccacacaccacaggacggcgggatcacccactcgccgtctgcggtactgacttcaatcagcccggtggccggatataaaaactgtgcccggcggtgagcgtggtattccagcagggtatcgggcaaataatcggtgccgagcgcaatgacatcccgcgcgatattatccacgctttttaacggaatatttctcatgagtgctgtgctccgtatctgactgaaagtaaaaaccggcgggtgttatatcagatcccgccaccgcaaaacagggcttttgtgacaataacagacgcggatgccacatctgtattattacggtaacaaacataaaacgttcagttaacagtaaccggaaacaggccggaattcaaatgtcgttgtctgatttgcgcatggcggcaatatattaatccattactattttgctgccgccattctgtttatacagattttaattatttccggttattaagcgattaccggtggcgtgaagttatttccggtcatttaaaattaaataatatttattatttcctgatgttttaaataccgcactctgtttctcacccggggtaaatccattatgagtcatcaatccggccacgataatgaaaaatccggcgctcccggcgaaataagccgccgccgctttatacaggtcagttctgtattatctgcggtgccgtttctggcatccgaaagtattgcatccgcgccggctgatccggcacatattccggttcatcagacggatgacggcgtgcgcattgtaccgacctgcagcagttttgactgcggcgggaaatgtgatatccgcgctcatatcaaagacggaaaagctatccgcatcacgacccggccggatgcggaactcaatgaagagatgccgatcatgcgggcctgcgtgcgcggacgcggctaccggaaatttatttatcatcctgatcgcctgaaatacccgatgaagcgggtcggtaagcgcggtgagggtcgttttgatcgcatcagctgggaagaagcgaccagcctgattgccgccgaatggcagcgcatcagtgacaaatacggcccggcatcacggtttgtcagcctgagtaccggggtgaccggcgggattttttccggcgcgaatatgctgcgccgcctgtttaatctgaccggcggctttctggaaaactatcattccgtcagtaacggcaacaccatggcggccacgccctatacctacggcacggcggccagcggcagcacactcgataccctggaaaatacgccgctggtgatcctgtggggacataatccgaacgaaacgattttcgggcacagtaaccactatttccagaagatgaaaaaaaacggcaccaaatttattgtcgttgatccgcgctattccgataccgcctcttcgctggcggatcagtggatcccgctgctgccgaccaccgacaacgcgatgatggatgcgatgatgtatgtcatcgtgacagaaaatctgcacgatcaggcatttattgataaatacaccctgggtttcagtgaagatcagatgccggaaagcgtggcggataatgaatcgctggtggcgtatctgaccggccgcaaagacggcatggccaaaaccccggaatgggcagagaaaatcaccaaagtcccggcggacactatccgtcagctggcgcgtgaatatgccacaaccaaaccggcggtgctgatgcagggctgggggccgcagcgtcatatctgcggtgagcgcagtgcgcgcggggccacgctgctggcaacgattaccggtaatgtcggtgtgcgtggcggctgggcagcgggttacggcatggcgctgaatccggaattgcgtaaaaccatcgccggaccggtgctgtttgataacccggtcaaagccaaaatcaacatcaccaaccaggtgcaggcgtgcgaagacaaaaacctggtgacgccggataacggactgaaaaatgcagacaaactcgacaccgaaatcaaaatgattttctcgatggcgggtaactacatgaccaaccagaacaccgatattcttcatgccgcaagcgtgctggaggatgaatcgaaagtcgaatttatcgtctgcagtgacctctatctcactccgagtgcgaaatatgctgacctgctgctgccggaaaccagttttctggaacgctggaatatcggcggcacctggagttacggcgattatctgatcctgtctgaaaaagccattgagccggagtttgaacgccgtactgattatgactggctgtgcgaagtggcagagaaactgggtgtccgtgatgctttcaccgaaggccatgaaacagatcgcgactggatagagtttctcgtcaatgacgcggcacagaagcgcccggaagataacattccaacctttgatgagctgctggtcaaacgccgccatttattaacgcatcgtccgcatacgcagaatgtcgcgtttgagcagaatattcaggatccggaaaacaacccgttcccgaccccgtccggcaaaatcgagattttctccaaacacctgtatgacatgcacaatccggagatcccggcgctgtctcactatgttccggcaacagaaggaccggaagacagtctgaccgcgaaatatccgttacagctgatcacctggaaagggcgcaaccgcgcgaactccacgcagtttgccaacccgtggttacaggaagtgcagcgccaggagttgtggatcaacccggcggatgcggctgatcgcggcgtcagtgacggtgagaaagtgaaagtgcataacgatcgcggtatcaccatgatcccggtgaaaatcacacagcgcattatgccgggcgtggtggcattacaggccggcgcctggtggcagccggacagcaacggcattgatcagggtggatgtgccaacgtgctcacctcgtcacgcagtaccgcgctcgcccacggcaacgcgcaccagacactattagttgaggtggaaaaagcatgagtaaattcattgtttatccggcagtcagtgacaaacagttaggtttctatattgattccgcccgctgctccggctgcaaggcgtgtcaggtggcgtgcaaggacaaaaataatcttgatgtcggccgccgtttccgtcgcgtgtatgaaatgaccggcggcggctacagccgcaataaaaacggtgcgctgattaataacgtgttcgcctgcacactctccatctcctgtaaccactgcaaagatccgatctgcgtgcgcaactgcccgacaatcgcaatgcataagcgcgaaggggacggcattgtgatggtcaataccgataaatgtgtcggctgcggtgcctgtgcgtggtcgtgtccgtacggcgcaccgcagatgaatccggaaacgaaacagatgtcgaaatgcgatttctgtattgatcttcagcagaaaggtgagcagccggtatgtgtcagcacctgtccgctcggggcgattcagttcggaccaattgaggaactgcgggcgaaatacggctcactcgattacgtgacaggtttgccggatccgtcaatcacgcatccgaatctggtgatcaatccgcatcagggcgcaaattttgatgacatgaacagtgagagaaaagaaaaatgaatgagtggtcacttttaattttcacttacatgatgaatgcggcggcggggctgtgcgttatgagcggggtgtttgccgtgcatctcagccgctgcctcccggcggacagtttcaaacgctttatgatgctgacgatttttattatctgcaccattgcgggggctggctcggtcgcatcaattacccacctcggcgtgccgcttaatgcgccgaatgccgttaataatgtgttcagtgcctggctcagccgtgaagtggtggtaacggccgcgtttgtcggtgcgctcggtgtcagttttctctggctgtggaagacaggaaaattctcttttctgttatacggtggcgccatggctgtcgggctggctgatattttttgtatggcatcgatttaccgttacacctcgattctgacctggaatgacatcaacacctatctgatgttttacggcacaacactgacactcggtgccgtcctgtttgtgccggtggtgatggtgatccggaaagccggacaccgggccgggattacactgcccgcagacacattatcattatcacagctgtggctgctgtggggagtgatggcggtaagtctgatcgggcgcctgctgtatcagccgttttatgcgcattacctgacccgtacacagctgacacacaaatcaatcacattcccgctgtcacccattgaagcgtatgacagtattgccgggctgcggattggtgtctggggtgcggcggtgattggtgtggcactctgcggtatctctctggtgcgggcacagaaaaaagcacgcagcggtttaccggtctgcgccgggtttatcagcggctgtctgctgaccatcgcggcagagtttatgctgcgttatgtgttctattacattcatatctgacgggggatgtaatgagtaaaacagctcactatgcggccgcgtttaacgtactggggatctgctatctgttcccgccggatgatgacagcaaccgggccgctatgcgcctgtttaccctgccgggatttgcacagcagtggccgtgtgaggtggacaatacactgtgttcacagctgagccgcacggctgcggagggcacagaggtactgaaatccgcatggcagtctctgtttgccgggccgggagcgttaccggctccgccctggggctcagtgtatctggatgcggagggattactgcagggggattcgacccttgcactgagcgcattcttaaaacaggagcggctgaaactgaagacgccgtatccggaaccggctgatcatatcgggctgattttattccaggcggcggtactggcatctgaaatgcggagcgcggcggttaacacactgctcagtcagcatctgatgaactggctgccgcgttatgcgcagcgtctggatacacacggacacagtccgttttattccgcgctgacccggctggcgctgaccaccgtgcaatcatttataaaagcataatattcacagttataaggtttgattacattgcccgtatcttatacgcctctttctccggaggcgtatttttttatctgttgtattacgtatttctttctgcatccaccggccggggaattgctgatttctcagcttgcacaggaaacctatgattccctgacagataaatccaaaagctcaccggaatcctataaaaaactgttttctgttaatccgccgtataacctggttttgcggatcacgtatgtgaataaagataataagaagaatatctttatcgcctccggactggctgacaaagatgagtgctcggtgcactttaacggctggctgacagagcagcgggaattctgaggccgtcataaacaaaaacacccggaccgatgccgggcgtgactggttatgcgggcattacagctcagagaaagcgtaagcggccgcatcaatggttttgcggatatcttcgtcgctgtgcgcgacagacataaatccggcctcaaaggcggatggcgccaggtaaataccctgttgcagcatcaggtggaagaatttcttaaagcgctcaacgtcgcagttcatcacatcctgatagcaggtgaccgccggggcatcggtaaagaacaggccgaacatcccaccgacatggttaaccacaaacggaatacccgcttcacgggctttttcgcacagaccgtctgccagcatatccgtcagttcggtcaggcgctgatgcacacccggctgggcgatttcatgtaagcaggcaagacccgccgccatcgcgatcgggttaccggacagcgttcctgcctgataaaccgggccggtcggagcgagtttttccatgatttcactacggccgccgaaggcacctaccggcattccgccaccgataattttacccaggcaggtcaggtccggctcaacatcataatgtgcctgagcaccgccgagggcgacacggaagccggtcatcacttcatcgataatcagcagcgcaccgaactcatcacacagagcgcgcaggcccggcaggaaatccgctgacggcggtatacagttcatattcccggcgaccggctcgacaatgatacaggcgatatcgtgcggatgtttttcaaacgcctcacggacagagctcaggtcattgtaggtgcaggtcagtgtgtgtctggcaaaatctgccggcacacccggtgaatttggctggccgatggtcagtgcgccggaaccggctttgaccagcaggcagtctgcgtgtccgtgatagcagccttcaaatttgatgattttatcgcgggcggtatagccgcgtgccagacgaatggcactcatggtggcttcggtaccggagttcaccatacgcaccatatccatggacggcaccagttcggtgacaaatttcgccatttccacttcgtcggcagtcggtgcgccgaaactcagccctttttccaccgctttgatgacggcggtgcggatggccgggtgattatgccccagcaccatcggcccccaggagccgacatagtcgatataggctttgccgtcgacatcataaatataggccccgttggcgcgctcgataaacagcggcgtaccgccgacaccgttaaaggcacgaaccggtgagttcacaccacccgggataaaatgttgtgcttcagtatagagattttcagaacggctcatgcaggactcctgtcagtcggtgagcgggaaattgcggctattgtaaaggagagcggcggtgaatccaacttatcgcattatcctcatgataactatatccttattaatagtgtggacactgtgctttctgtgtggcgaaacttgaacgattgccggaggtggtggataatcagcagtagtgtccggaagcggtcagcttctgcgtgtgtttactggttgcggccagtctggagtaataaatgagcgatgattcagcaatgcctctgcaatttactgatgcggcagctaaaaaagtaaaaatcttaatcgcggatgaagaaaatccgaacctgcgtctgcgtgtgtatatcaccggcggcggttgcagcggtttccagtatggcttcacgtttgatgatgccatcaatgacggcgacatgaccatcgaaaaagaaggcgtggcgctggtggttgatccgatgagcctgcaatatctggtcggcggttgtgtggattataccgaagggctggaaggttcgcggtttatcgtcaccaacccgaatgccaaaacaacctgtggctgtggttcttctttcagtatctgatttatccgcagacaaaaaacgggcgcttttgcgcccgttttgtttttatgccgataagtatcattaaagaaagaagggttattttctgcaacctgtatcacatacaataaaagaggataattgtgtatatccggcctcagatagagaaaatcggtcattcaggatgattttattccgctgcactgcaaaaaccaggatctccggctgaaacaggagcatataaatacggcggactatattatataacggtgtaatactaatattatttgtcagataaactgatgagttaataaaatgaaacaaaaatatattatttaatatttttaatccaggttttttattgtcatatagtttttaatttaattatttattaaatatcaatcgcatttacggcattttaacatagtgctgaggttggtttatttctttgatttgtaatgatttttatttatccgctcagctccattatattcatcattgtctgattatattatcgctgcatgtttatatatatagcggcaagttgatttcatctcgatcccgctcaatatgccggtatttcactcatttacactgaacatgtaaaaatattacctgttcacatcggtcacacctgaaatatgagaaataaatgcaggaatataccggactattttatctcagccagtgatacccgccggagagtttccggcagcgtacgttaaggaatcttctatgatttacccgctgacagaacagaccccggttttacagcataatgcggcgttgcagcggtatgtccggcgttatgccgatattgaaaaacagacacagcaggccatcgcacagtacggattgtcttttgaatcgccgtaccggcgtcaggccgaaacggacgcgctgcgccttgaggtgaaagcactgggtgcggtttttgccaacaacggtaaaagcatccacagccgctggctgtcatccgcctgtgtgcagtgccgcaccggcgagggcagttacaccacgtttttatccctgaaatgtcaccgtgactgctatttctgcttcaatccgaatcaggaaaattacgacggttttcagaatgagatgcgggatgccattggtgaggtgaatgcgattgccgcagaagggtatccgctcacccatattgccctgaccggcggcgagccgttgttgtttcgtcaggagagtatccgcttttttgaaacagtgcaggcgaaactgcccggcgttcatacccggctgtacaccgccggtgatccgctggatcgcaatactgcgctggcactggcgaaagccggtctgaaagaggtgcgtttcagtatcaaaattgatgatccgccggagaaaattgaaaaggttctcagccggatagcgctggcacgggagattttcccggatgtgatggtggaaatgccggtgatcccgggtagcgaggagcagatgtatgacctgctgctgaagctggatgctatcggcgtggacggcatcaatctgctggaattctgtttcccgctgaccaacagccctgcctatcaggaacggggctttgccctgaaaaatcccccttatgaagtctattacaactactggtacgcaggcggtctggcggtggcagacagtgagctggcctgtctgcgggtgctgaaatttgccctcggaaatcagctttccgttggtgtgcattactgctcgctggagaacaaacacaccggccaggtgtatcagagtaatgcatttatcagcgcggagccgtattacctgttttcttcccgtgattactttttcaaaagcgccaaggtgttcggtgaggactgtgctgccgtcgcggcagcattgcgtaaggcgggtgtcccgttccgtgaggatctcctgcacggttttttacaattcagtcctgaatcgattatgcgcctgacagacatccctgaactgcctgttctgctgacatcccacattgcggaagccgatgaacagggcaatcccctgattaaagaagtgcgggtggaattcaccacacccgctgaattttcgcccgacgatatccacggaggtatgtgtgaacagtgataaccgggatccggattatctgtatgcgcgtcagtttgcttatgacgtcctgcgccgtctgctgacggacgaaccgacagcggaactgctggtttatctgcgtgatgaggggctgtcactgtttccggcagatgacgcactgcccgccatgcagagtgcgctcgatgccatgcaggatgatctgaatacccgcatgcttaaacgcggtgccgccgattttgaggcgctgcactgggatttcacacgcctgtttatcgggccggaatcgccgcctgcaccgccgtgggagtcagtttatgtctcccgcgacaaactgctgtttcaggaaagtaccctgaatgtgaaaaccttttatcagcagaacggttttcatctgccggaaaaggagtatgaggcggcggatcatatcggctatgagcttgatttcctctggaaactgagtgaacaggcgtcacaggagctcgaccgggaacaggcgatgtgtgagcgcattactgcgccgctggccgtttcctctgactttatgcaggcacatctgctggcgtttatcacgccgttttgccgtgaactgaataatcacgcggagaccgcgttttatcgtcagctcagcacacttctggaagtctttgtccggagtgattataagaaaatcaatgaattaataaacttacaataataatttaaaaacctgatgatgaggtaagagcaatgtcagacagacagaaaaccggcgtaacccgccgttcatttctgaaatggacgtcggcggcatccgccatggcggcactgccgttaagcagacaacttcacgcggccaccccggcaccggcacagaccaccccggcggcggcacctgccgccaaagggcagtggaaacctgtcgcctgctggcataactgcggcgggcgctgtgttaacaaagcactggtggccgatggtgtggtggtcagacaaaaaactgatgatgtggtggcggattcccctgacttcccgcagcagcgcgggtgtctgcgcgggcgttcccagcgtaaacaggtgttcggggccgaccgcctgaaatacccgatgaaacgcaaaaactgggcgccgggcggcggggacaaaaccctgcgcggacgtgatcagtgggtgcgtatcagctgggatgaggcactggatattgtggcctccgaaaccaaacgcatcaccggacaatacggcaatgaatccctctgggttaccggcggtaacggtacggatttccagagtgtgttctccgccgccgggggctttaccggtgactggggcaccacctcctggggcgcatggtttgaaaccccggcccatctgggcctcctggaagggttctacaccttcggcaccaatgaccgttttgatatgcgcaactcacaactgattgtgatgtggggcgcaaacccggcgtggtccagcccgggcagcccgacttataactattatcaggcgaaaaaagccggggcacgttttatcagtattgacccgagttataccgccaccgcagagctgatggatgcggactggtatccgatcaacccgggtacagaccacgcgctggcgctggggattatgcatgcactgctggagatggacagcccggagaatccgctgatcgattgggaattcctgcgacgctgcactgtcggttttgatgagagcaatatgccggcaggggcggatccgaagaaaaactttaaggattatctgctcggcacctacaccggcaagccaaccaccccggaatgggcggcagacatctgcggtatttccgcatcggacatccgctcgctggcgcgtcagatcggcggcacacagcgtgtggcgctgttaaccggttgggcaccggcacgtattcataacggtgagggatgggttcaggcattctcaacactcgggtttatgaccgggcatatgggccgtccgggccgcatgactggtgcgtgttgtcactatgccgccgggaacaacggtacccgtctggtgatggccggtgcgaacggcttaccggcagtgaaaaacccggtcactctgaaaatcaaccacaacgaactgaaccgcgccctgctggagaaaaaattccgtcagcgcggcgtgggggatgtggatgccaatattcagatgattttccacccgtttaacgccaccttacagacccgcgccaacattatgcagggaatcgaggcgtatcgcagcggcgtggaatttatcgcgaccgcagcttatgtcccgcatacctgtgcgaaatattccgatgtgatcctgccggtgacaaccgaatgggagcgcgagggaaccattcttaacccgagtaaccgtgaagtcatcattgctgcggtgaatgtgactcagccgctgtatgaagcgaaaagcgaccagtggatcgccaaagagctgggtaaacgtctgggtatcaatgtggatgagatcttcccgatctccgaaaaacagcagttcttcaataaactcaacggtgcaaccatcattactgaggatggtgtcaccaaagcgccgctgtttaccatcactcaggcggatattgatgagtggcaggtgaccggtacgccgcaggaagggcgcatcacgctgaatgaattcctgaccaaagggaagtatcaggtggagcgcacgccggatgataattacggctatatcgcgtatgaggactttatccgcgatccggcggcgaatccgcgtccgacgccaagcggtaagtttgaaatctactgcgaaaccctggtggagaaagcgaaagagtgcggctggacagaattaccgccgatcgccgaatacatcccgtcagcgagcggctatgaagccagctttaaagatttcagcaaaaaagagaaaggggattatccgttccaggtttataacccgcactatctgcgccgttcacacagtaccctggataacgtgccgtggctgcgcgaacagtggccgagcccgatctacattaatacctctgatgcgaaacgtctggatattaaacagggcgaaaccgttctggtgaccagcccgcagggtaaaattctgcgtccggcgctggtgacccagacgatgaaaccgggtgtggttgcactgccgcacggcagttggaccaatgtggatgaaaccaccgggattgatatggccggggcggataacaccctgaccattcaggtaccgaccggactgggtacctccgggtggaacacgatgctgtgtaacatcgaaaaatggcacggtgagcaattaactgacgatgcgcgtctgccgcagcggattatcggataaggggcacagacatggataaccaagttggattttatataaatgtcgccgcctgcatcgggtgcaaaacctgtgttgtggcgtgcaaggataagaacgatctcgaagtcgggcgtaatttccgccgtgtgtatgatatcgaggccggggaatatccgcgcccgcgccgctggcatctctcgattgcctgtaatcattgtgacgatccgcagtgcgtcagccattgcccgacaaccgcgatgcataagcgggaagaggacggggtggtgctggtggatcatgataagtgtgtgggctgccgctactgtacctgggcctgtccgtatgaagcaccgcagtttgatccggcgatcggtatgatgaccaagtgtgatacctgtctggatctgcgggagcagggcggcaatccgatgtgtgtggattcctgcccgatgcgcgccattgagttcggccttatcagcgaactgcgcaaaaaatacggcaccaatgccgatatcggcggcttgccaagctcatccattacccggccgaacctggttgtcggcaccaaaggataaggagaattatcatgcatgaactgcctcttgttatattcaccttatttatgcaggcttcggtcggctgtctggtgatcacgctgctttgttatttccgtctgttcggctgcacggatgcccgcaccgggatgaaatgggtgcgtgttccgctggttgcttctttcctgctgggctgtgtcggcttactcggctccctgttccatatggggaatccgttccatatgttttacaccatgctgcacgtctcgacctcgtggatgagccgtgaagtctgggcgaccgccatttatatggcgctgctgttcttcagtgtcgcgctgctgctgttaaaacagaaagtgaacggcttcctgctgctgttaagtgcggcggcggggctggtgtatatgtatgcgatgtccgcactgtatgcgaataccctgtttaacctgtggggcgggctgtttacctatgccggattcttcggcacagtactgctgaccggcgggatgatcgcaggtctgctgctggtgaccgcgctgggctttgcccgtgaggatgtgctgattcagcgtgtggtgaaaatttccctcgccgccggtgtggccgggctgctgctgatgctgttgggcgcattgtctctgctcggtaatatcggtgagccggtctacgcagggatgacaccgcgtaccatgccggaagggctgctgaatctgaatatcatccgcgtggtgctgatcgggctggggatgttctttgccggtcgtctgctgtgtcagaaaaatgcacagatcactaacggcacactgatgatggctctggcggccatctgtgtatttgccggtgaagcggtcggtcgggtggtgttcttctcactcggcgcataacacgctgtatgaaacaaaaaatccggacgtgagagcgtccggattttttatcagcgggtcagaatcacatcccctaagatattgtctttcagcaggccgccgtttttcgcccggaacagcacaaaatcaatatcccgtgcctgatagcgctcacgcagaatggtggtgatctctttgatcgccttaccctgcagtaatccgtcaatcatcatcgccagcagcagagactggtcgctgtaggtcagcggattgagcgaccccatgacccggttgagatagtgatcaaagaccggcagcgggttttccgggtgttcgcggttcagtttaatctgcacgtcgatcacggtattaaaatcaataccataatgagcaatgcggtcgcgcagatcattgacatagcgatcgacatcatcggaatagagtgtgctgatggtgccgccgaatgtaaacagcgtcatgccgttcaggcgctgcagaatatacagggcaatataaagattgtagcgtgacgggatcagcagacagttatcaatccaccagaccagcacatgatgcgggctgatgctgtcatcaatatatttgaccggcggatagatcattatttctgtatcacttaactcaccgaggtgcgtctggatcagattatccacctgacgccactccagcccgccgctgccgcaaccgagtgccggaattgccacggatttcagcccctgttttttgatcagggctttcagttcacgcaggccactttcgataaattcataaccggaaggggaatcccatttattccgggtcgggaaattaataattttacgtccgtgttcatcagttactgataactgaccggcgcctattttattttctttgcataaggcttcataggcgcgtgcatttaccggataatccagtctgaactgataggcaattccttttcccataacgccctgacaattaacggcatttaccagcgcctgagcatcagatctcagtaaatcacctttgaggtatttaatcatcgttacagtccgtttctttattcagtctgtgacattgtcgcctgctccggcgctgacgggtatcggaatcttctcgggtttacggaataagaatagtcacggaaataataagtaataataacaggagaaataaagctgaattaaatataagaaaataaaaaaagagaatatgccgcataataagcggcatattattaacatgatatattcatatcaggtattatttattttctcacataattcttccgcagcttttaacagccggggcgtgccgcgctggaaccagtcggcattaatcgtaatcaccggcacatcaagctgcggagaccagaagcgctttacattctccacttcgcggttatccccggagataaggatcatgtccggtctgcgggtcagtacctgctcgcggttgacctgcggccagggcaccgggctgtcggcaaatacgtttttaccccggcacagtgttaccacttcactttgcagagtggtgccggacgcggtgaaaatcgggttctgaccgaactggagaaaaatcagtttctccggtttattgccgtagcgggttttcagggcatcaatcccgctgcgcatatctgaagccgctttttccgccagcgccggttgcgggctgtaaggcgcgaggcgatccagatcatccgcaatttcatcaagattgcgcggatcgaaatactcgactttgatcccgagatgctccagctgactcagcgggcgctgcgggttgccgccgcgccaggccatgatcagatccggtttcagggcaataatgcgctcaaggttcagtccctgccagctggacacctgcccgatgtttttcgcttccggcggataatccgcattggcgctgacaccgaccaggttctcccccagaccggcggcatacgccatctccgccagtgacggagagagcgcgatcacccgctgtgccgctgcctgtgccccgcaggcggccagcagaaacagcagtccggcgaggcgcaatgttggttttatcatttcagtgaatcaatattggcgaggatttccgccaccatcagagacgattgctttgctgccagcggcagaaactcatcaaagctgaggtgcgaggctttatccgccacgtcagagatagcgcggaccaccacaaacggtacctgatactgatggcacacatggccgacagccgcacattccatttccactgcgattactgacgggaaggtggtacggatacgcgccagcggctctgcgccgttgataaaggcatcaccgctgcaaatcaggccgcgcaccgcgttcaggccgagggtctgaatgcatttttcagtcagtgcgataagaccggcatcggcaataaaggccggcgggcattgtgccatctggcccggttcataaccgaacgcagtgacatccgcatcgtgataacggacttccgaggagacaacaatatcgccgacattcagatgcggcgcgaggccaccggcagaaccggtattaatcaccacatccggtttgcacagctccagcagcagagtggtaccgatcgctgcggcgactttgccgataccggatttgagcagtgcgacatcaacaccgttaatctgaccggtatagatttcgcagccgccgtggcggagggtctgcatgttggtaatctgatcacgcagcagtgttacttcctgctccatcgcacctatgataccgactttcattatgtcatactccctgaatagaaattgaactgcataataacggattagcaacagtttatcaccgaatcccggcgggcggtgtcttttcccgtgcggataagaagacggaggcgacgtgccggttattgattttaaaaagaagctgaattttcaccgccagtttggtgcttctgcggaggaatctgcacaagagtttctggtgaatcaggcatttgaaagcgatcgcggccgtattatcaattctgccgctgtccgtcgtctgcaacagaaaacccaggtgtttccgctggagcagaattccgccgtccgcagccgtctcacacactccctcgaagtgcagcaggtcgggcggtatatcgccaaaacgatcctcagtcagctgaaacaagcacaaaaactggaagaatacggcctggatgagcgtacggatgcctttgagagtgtggttgaaatggcgtgtctgatgcatgacatcggcaacccgccgttcgggcatttcggggaggcggcgattcagaaatggttcagtaacctgctgggggagccacagaccggggatgaggataactgtcagattgccgcactgcgcctgaccggctcaccgcaatcggatcatctgcgccgtcagttgcgtcgtgatttgtgcctgtttgagggcaatgcccagggaatgcggatggcacaccatctgctgaaactgaatctgacatttgcccagataggcagtgtgctgaaatatacccgtcctgcctggcagttagagccggtgccggaggagttcaattatctaaccaaaaaaccgggctattactggtctgaaaataccctgattcagcggctgcgtgatgaattacagctcggtgagttctgccgttttccgcttagttatattatggaagcggcggatgatatctcgtattgcattgctgacctggatgatgcggtggagaaaggtattctgaccccggataccctggtgacctatctgcgccaggagtggcaggcgctggaaggctctgcggattccgcgctgttccgcgataccgttgagcaggcgtatcagtcgcttacccgcagtcagcaccgcagcccgcaggatcagttttttatgtatctgcgggtctatatcaccaataaactggtgccgtataccgcgcagcgctttatcgataatctgcccgccgtgtttgcgggtacttacaatcaggcgctgctggaagataaaagtgaagagcaccgtctgctgaaaaccctgaaacgggtcgcgtttaaatatgtgtttacccaccacgaagtggaagagcttgaattacagggattccggatcatcaacggcctgctggatttttaccggccgctgttaatgatgccgcaggcggatttcgccgatctggtccgtgaaaacttccacaaacactattttatcgaaacccggctgttacataagctgtcacgcaagcagcgggcggcctacggggaagccgttgccgcactggcagataaaccgccggaagagcagaccatcctggaattttattaccgcgccaggctgattcaggattatatcagcggtatgaccgaccattacgcttacgaagaattccggcgtttctccgtttgtcagtaagctgctgataaatgacagcactttcgcacaaatgacatgacaattccggttcaatattaccggaattgttgctacgattaatccgcaggtgttgctgaaatagattcactgtattcggcggcggatctgttcatcatattgtcgcagcctgaattcgtttcaggggctataccgtcgcaccaaaagtattaaccgggattacatcacgtatgcaaaaagagtatcgggtcgggattgaatttgaatattggctgacacagtaccggaataaaagtgccgccggtattaaatcctttgacaatattaccctgtcagagctggcgcctgcactgaataaccgcccggggatggatgatgcctcgctgcataagggtgatgcggggattaaagccggttactggtatgttgagggcgatgagcggttttcaccggaaggcaaactcattgcccaggttatcaaaggtatagaaatccgcacgccaccggcaaagtcggtgacagcggcactggatttcctgcagattattgaagcgcagctgagtgaacgtctgaaagcgtgcgggctggggctggcaatcagtgcttatcatccggtttcgccgcgctatcagtttaatccgccgctgaatgcatgggaaaaagcgttccgtgaggagcacgctgctttccgccacgcggatctggtaatgcagacctgcgggccggatatcaatatttccgtgccggaaatgagtgacgcccgtgttgtgcacgcggttgaaaaactgacgttctttgcaccgtacctggtggcgctttcgctgaacggtccgctggaaaacgggcagttatggggcggtttatcccgccgtaccgcactgcgcagttgtcaccgtccggcctgtaaagggttcctgaccaactcggcggtgtatccgcatgactttatttatccggcacgtaacgagggtgagcacggtcggattgaattcaaagcgttcgatgcggttccggacccggcgctgatgggcgcattctgtgcgtggatcctcgggctggtgctggatgacaccatttcctttaattacagcgtgcagccggacgcccgctttaatgcgattgcccgcgagccgtttgccgacctgactgtttccacggtggttgagacactgcttatcgccgcccggcgcgcgctggagcagcatggcctgctgaatgaagcggcgcggctgcagttactcagtgaacgtctggcaaacagaatgaccccggcggatgaaatgatcacccgtttcctggtcagcggggagttaatgcatttcggcggattgtggccggagcaggatgcataacgctgtcatatcaggatacatttttattgccggtaacaataaaccgttattttttaaataacggttttttttgtgccaaaaaaatcagcaccggtaagttcatgtaaatttattatttatcagtggctgatattgcgtattattcagcgggtggtgcggtatcaggcattataaataatgaaaccggcagcactgatgtgtaacgataaatatcatttatccttttaacaaatagtgctgaggcactatccggcagtatggtataatcagcgccatgcattttttaccggtccatgacgtgttatttgcagtgtatccgaagaatccgttggtcaatacgctgctttatgggaaaatcaccggcctcacagacaacgttttttatcattatggcgcaattttattctcagccccgtcagaccccgcggcagtcccggactgtcacagtcaccgctgactctctcgatgccctcgggcagggcattgcccgccttcagggaaaaactgtttttatcccggatctgatgccgggtgagtccgcacaggtcaggctgacggaagaaaagcgtcactatgccaaaggcagtgtggtgaaacgcctgtctgataacccggcgcgccgcaaaccagcctgccgtcattacggacagtgcggcggctgccagcagcagcatattccggttgccatgcagcgggaaaccaaagcggcgtatctcgcgtatctgctgacccgcgaaacaggtgaggcgtgcggggagatccctgttctgagcggggaagagtacggctaccgccgccgggcgcggctggcgctggtgtattccccgaaaacaaaacagctgaccatgggattccgtcaggcgcagagcaaatcaacggttgctgtcacacagtgtccggtgctggttccgcgtctggaggcattactggtacccttacagcgctgtctgtcgtctctggccgccgcaccggaactcggtcacgcggaactggcagataccgaaagcggaccgctgctggtactgcgtcatctggcaccgctcagtgatgcggatttgtccgcactgacggcgttttgtgctgaacacaataccgcgctttatctgcagggcagtgccggtgcaccgcctgtggcagtttgtgcgccgtatcctccgcattacgcggtagccgggttaaaattacagttcagtccgcaggattttatccaggtgaacggtgccctgaatgagctgatggtggcacaggcgctgaactggttggagctgacaaaacacgatcgcgtgttagatctcttctgcgggatgggtaattttacgctgccggtggcggaacgcgccggtgaggttgtcggggtggaaggcgtggatgcgctggtccgcacggcacgggagaatgcccgtctcaataatctggcgaatgccgcattttatcacgcggatttgtcgcaggatattaccggggagccgtgggcggcttccgggtttaacaaagtattactggatccggcgcgtgccggggcggctgagattatgccgcatattgttgcgctttcccctgagcgcatcgtttatgtttcctgtaatcccacaacacttgcaagggatagtcaggttctgcatggtgccgggtatcaccggaatgctgtccgtatgctggatatgtttccgcaaaccggccatttggagtcgatggtgcttttcacaaagacaccaccggtcagtcagtagggagaatgtatggtcgcggtaagaagtgcgcatttaacaccggccggtgagtttgacccggcacactggattaacagcctcgggctgcataacccggtgacgggtgaaaaactggaagaggtctggcattactgtcatcagaaggttgatggacatcaggatgcggcgctgttgctcgggcgcggtattgagatggtggaaattttatccaccctcagtatggatctcgacagtctgcgcgcagcgttgctttttccgctggccgaagcggagatcctcggagaggaagagataagcgaagcctttggtcccgctatctggctgctggtcaaaggtgtgatggatatggatgctatccgtcagctgaaagccacccataacgacgaaaccagctcggtgcaggtggataacatccgccgtatgctgctctccatggtggaagatttccgctgcgtggttatcaaactggcagagcggatagcccatctgcgcgaagtgaaagatgccggtgaggacgagcgcgttctggccgccaaagagtgtttcaatatttatgccccgctggcgaaccgcctcgggatcgggcaactgaaatgggagctggaggattactgcttccgttatctgcacccggatgattacaaacgcattgccagcctgctgcatgaacgccgtcttgaccgcgaagagtatattgataactttgtcacgaccctgcgcaacgacatgaaagaagagggcattcaggccgagatctacggacggccgaagcacatctacagtatctggcgcaagatgcagaaaaaatcgctctcctttgatgagctgtttgatgtccgcgccgtgcggattgtggtggagcgtcttcaggactgctacgccgcgctcgggattgttcacacccatttccgtcatctgccggatgagtttgatgactatgtggcgaacccgaaaccgaacggttatcagtcgattcatactgtggtgctgggtccggcgggcaaaaccctggaaattcagatccgcacccggcagatgcatgaggatgcggagctcggcgttgccgcgcactggaaatacaaagaaggtaccgcaggcggcggcaaaaccggcagttacgaaaaccgtatcgcctggctgcgtaaactgatcgcgtggcaggaagagatggccgattccggtgaaatgctggatgaagtgcgcagtcaggtgtttgatgaccgcgtttatgtctttaccccgaaaggggatgtggtggatttaccggccggctccacgccgctcgattttgcttatcacatccacagcgatgtgggtcaccgctgcatcggcgcaaaaatcggcggtcgtattgtaccgttcagttaccagttgcagatgggtgatcagattgaagtgatcacccagaaacagccgaacccgagccgtgactggctgaacccgaacctggggtatgtcaccaccagccggggccgcgccaagatccataactggttccgcaagcaggatcgcgataaaaatattatcgccgggcggcagatgctggacaacgaactggccgcgcaggatatcagcctgaaagaggcggaaaaactgctgatcgcccgttataacgttcactcgctggatgaagttctggccggtattggtgtcggtgatatccgcatcaaccagctgtcgaactacctgcaaagcaaactgaacaagccgacagcggaagaggccgatcgcgaagccctgaaaaccctggaaaaagccccgccggccaaaccggcaccggctcaccagagcagcggccgtattgtggttgagggtgtcggtaacctgatgcatcacattgcccgctgctgccagccgattccgggggatgatattgtcggctttatcaccaaaggccgggggatttccatccaccgtgcggattgcgaacagctggcggaattgcaggagcaggcacctgagcgcctggtggaagcggtctggagtgcgagttactccagcggctattccctggtggtgcgtgtggtggcgaatgaccgcagcggcctgttgcgcgatatcaccactattctggccaacgagaaagtgaatgttctcggggtgcgcagccacagtgatgtgaaacagcagattgccaccattgatatggatatggaaatctacaatatccagaccctcagtcgtgtgctggcaaaactgaaccaactgccggatgtgattgaggcaaaacgtcacactcagtaaaacggccggaaatcggttacactgaactgaaaaaagcagacgcctgtctgcttttttatcctcccggaaatcatattcaggaattaatcacatgtctgtatcagttgaacgcctgctggcgatcatgtcgcagttacgcgacccggaaaacggctgtccgtgggacaaagcacaaacctatgccactatcgccccttacaccctggaagagacctatgaggttctggacgcgattgagcgggcggattttgacgatctgaaaggtgagttaggtgacttattatttcaggtggtgttttacgcgcagatggcgaaagaggaagggcgttttgattttgaggatatcgccgccgccgtcagtgacaaactgacccgccgccacccgcatatttttgcccgtgagcaggggatcggtgcggaagcggccatttccggctgggagcagcgaaaaagtgccgaacgcgctgaaaaatcacagtattccctgctggatgatatcccggcaacactgcctgccctgatgcgggcctataaaatccagaaacgctgtgcgtctgccggatttgactgggacacacttccgccggtgctcggtaaggtgtatgaggaactggatgaggtgatggaggaagtgaatcagccgcaggtgaatgatgagcgcgtggctgaagagctgggtgatttgctgttcgcagtggtgaatttttcccgtcatctgggacataaaccggaaatggtgttacaaaaagcctgccgtaagtttgagaaccgttttcgtcaggtggagagcgatattgccgcccgcggactgaccatggaatcagcaacacttgatgaaatggagaaaagttggcaggatgttaaatcccgtgaggggtaagcttaatgctttcagctaatgattttaccggagaatgaaaagttttttataaaatgtaagacgttgattagttagtgtaaaaaggcggtttttaccgccccgggagcgacggataaccgaaaagaggtgacgagattatttgtcgccaaaataaggttagggtatactattttcccgtcctgttatatccatcatctattacacctaaactttcaggttcagcatgaaaactaattatatttttgtgaccggcggggtcgtatcctctctgggtaaaggcattgccgcagcctctttagcggctatactcgaagcccgtggactcaatgtcaccatgatgaaactggatccgtacatcaacgtcgatccgggaaccatgagcccgacccaacacggggaagttttcgtcaccaacgacggcgctgaaactgatctcgacttaggtcactacgagcgcttcatccgcaccaaaatgacccgccgcaataacttcaccaccggacgtgtttactctgaagttctgcgcaaagagcgccgcggcgactatctcggtgccaccattcaggttatcccgcacatcaccaacgaaatcaaagatcgtatcatccgtggcggtgaaggtcatgacgtggtgctggtggaagtcggcgggactgtcggtgatatcgaatcactgccgttcctggaagctatccgtcagatggcggcggaagtcggccgtgaacacaccttatatctgcatttgactttggttccgtatctggcggctgccggtgaagtaaaaaccaagccgactcagcactcagtgaaagaattattatccatcggtattcagccggatgtgctgatttgccgttcagacagagtgattcctgctaacgaacgcgccaaaatcgcgcttttctgtaacgttcctgaaaaagcagtgatcagtctgaaagacgtagattccatttataaaatccccggcctcttgaaatcccagggattagatgattatatctgtaaacgattcagcattaatgctcctgaggcagatctctccgaatgggagcaggtgatttatgaggaagccaatccgtcaggtgaagtcaccatcgggatggtcggcaaatatgttgaactgccggatgcctataaatccgttatcgaagcactgaaacacggcggcctgaaaaaccgcgtcactgtgaacatcaaactgattgattctcaggatgtggaaacccgcggtacagaactgttacagggtctggatgcgattctggtgccgggcggttttggttcccgtggtgtggaaggtaagattatgactgcccgctatgcccgcgagaacaacattccgtatctgggcatttgcctgggaatgcaggtggcactgattgactttgcccgtaacctggccggtatggatgacgcgaactccacggaatttgatgctgattgtaagtacccggtcgttgcgcttatcaccgaatggcgcgacgaagacggcaatattgaagtccgcagcgaagagagtgatctcggcggtacaatgcgtgtcggcggtcagttatgccacctgacgaacaattccttggttcgccggttgtacggcaaagatgcgattactgaacgtcaccgtcatcgttatgaagtgaacaacatgttactgaagcgtcttgaagatgcgggtctgctggttgcgggccgctcagtggataacaaactggtggaaatcatcgagaacccgaaccatccgtggtttgtggcctgtcagttccatccggagttcacctctaccccgcgtgatggtcatccgctgtttgcaggttttgtcaaggcagcctctgataaccagaaaggtctgctaaaataagatgtgaggtgagtgaccggctgtaagtgccggttacttatctgaaaatttaacttgtactgaggaaaacctaatgtccaaaatcgttaaagtgatcggccgtgaaatcatcgactcccgcggtaaccctactgtagaagctgaagtacacctggaaggcggttttgtgggtatggcggctgctccgtcaggcgcatctaccggttcccgtgaagcgctggaactgcgtgacggtgataaatcacgtttcctgggtaaaggtgttctgaaggcagtcggcgcggtaaatggtccgatcgcacaggcgctgctgggtcaggatgccaaagatcaggcaaaagttgaccagatcatgatcgacctggatggcactgaaaacaaatccaacttcggtgcaaacgcgattctggctgtgtctctggcaaacgccaaagctgctgccgcatcaaaaggtttacctctgtacgcacacatcgcagaactgaacggcactccgggcaaatactctatgccgctgccgatgatgaacatcctgaacggtggtgagcacgctgataacaacgtggacatccaggaattcatgatccagcctgtcggcgcgccttctctgaaagaagctgtccgcatgggttctgaaatcttccatcacctggcaaaagtgctgaaagctaaaggcatgaacaccgctgtgggtgatgaaggtggttatgcaccaaacctgggttctaacgcagaagcgctggctgacatcaaagaagccgttaaagcagcaggctacgagttaggcaaagacgttaccctggcgatggactgtgcagcatctgagttctacaacaaagaaaccggtatgtatgaactgaaaggcgaaggccgtacctttacctctcaggaattcactcactacctggaagagctgaccaaagagtatccgatcgtctctatcgaagatggtctggatgaatctgactgggatggtttcgcgtatcagactaaagtcatgggcgataaaatccagctggtcggtgatgacctgttcgtgaccaataccaagatcctgaaagaaggtatcgaaaaaggtatcgttaactccattctgattaaattcaaccagatcggttcactgaccgaaacactggctgctatcaaaatggcaaaagacgccggttacactgccgttatctctcaccgttccggtgaaaccgaagatgccacgattgccgacctggctgtcggtaccgcagcaggccagatcaaaaccggttctatgagccgttctgaccgtgttgccaagtacaaccaactgatccgtatcgaagaagcgctgggcgaacgtgctccgttccacggccgcaaagagatcaaaggtcagtaattgttactgtgaatgttaaaaaaggtgtgtccggcgggcacacctttttttatgaccgcgttatcttatcttacgaatattcccccgctttctatccgttctctcaatgactaaaactggtcatttaccatgctatgacaagtttttttacttattctgttgcctcagatcgcaaaacggacgatttgtgatgtattttgttattaatactttttatatttcacatgaagataaattgtttaacatttttagcattcacgcaaaaatgccggttattaaactatgacagcaatcggtttcgtgaatactttttcatcctactgagggaattatcatggacgcttcagaaacgctcacccaatccaccgggctgggttcttttaatacaaagggactcatcatactggctctggacatcgtggtgctgatactgctgctgaaatacctgccctacagcgacaaagaaaatgccgggctggcgctgatggtgttcgtcgctgttttatggctgactgaggcgattcatgtcacgctgaccgcgttactgatcccgattctggccgtttttctcggattactgggcgcaggtaaggcattacagtcttttgccagtccgaccattttcctgttcttcggtggctttgcgctggcgacggcactgcatattcaggggctggatcgcctgattgccaaccgcctgctgctgattgcccgcggtcgtttatgggcggcagtgattctgctgttcagtgtgaccggtgcgctgtccatgtggatcagtaacactgctaccgccgcgatgatgttaccgctggtgctgggtattctggggaacctcgatatccgtcacgaccgtaacacgttcgtatttatgctgctgggcgtggcgtacagcgccagtatcggcggcctgggaacgatggtcggcagcccgccgaacattattgccgcaaaccagctgggaatggacttcttcacctggatgaaatacggcattccgatggtgctgatcctgatgccgattatgttcggtattatgtacctgatgttacgtccgaagctcggtgcccgctttgaaattgaagtggagcaggttcagtggacaccaaaacgtctgctgacactggcgattttcggtctgaccgttatctgctggatcggcagtgcaccgctgagtgatctgctgggtaaaatcaaagatttcgatactattatcgccctgagtgccgctgcgctgattggtattaccggggtggccagctggtcacagattcagaacaacaccgagtggggcgttctgttcttgttcggcggcggtctgacactgagtatgatcctgaaagattccggtgccagtgaagtgatggcggactggatgaaaacctcctttggtaacagcagctggctggtgattattatcgctgtcaccacctttattattgtgctgacggagttcaccagtaacaccgcgagtgctgcactgctggtacctatctttgccggtgtggcagatggtctgggaatgccggtgatggcactgaccatgattatcggtatcggtgcatcctgtgcctttatgctgccggtggcgacgccgccgaatgcgatagtgttcgggaccgggtttatcaaacagtctgagatggtgcgggtcggtggtgtgctgaatatcgcctgtatcattgttatttcagcctttgcctggttgttctgggtataacagcacagctgataataaacacgaaagcaaagttcaacacagaaaacctgctgatttatcagcgggtttttttataccggcaacaaagaatatcggtgcggatgtactgatatcgcagaagtgcgggaaagaagaagagcagccggaaagacattcaggtatcaccggatatgaaaaagccctgcgtcatgcagggcttcagataaagcgtggtgattcagtgattatcagccgcgtttattggcaacataaaccgttagctcaatacccggatgcaagtccttcattttgactttactgttccaggacatcagctctttcagtgtcacaccatggcgctgcgcaatactgtagtaagaatcaccctgacgcactttatacttcgccagacgcatagcatttttggtggcggctttagatggtttcaccaccgggctgcctttcacctgcaacgtttgtcccggtttcagaaccgcagcgcttttcagtccgttcagctttttcagttcagcgacggtcatcttatggcggttggcaatggcgtagaacgaatcaccgcttttcactttatatttcgcagcttgtgcacggccagccggcgaactcagctgttcagttcgctgattgtttcttgcgaccgctgtgcggatatcatcaagcactgcgtcatcagataacgcgttcatcagctggtcgactttggttttcggcagcatcagatagtgaggtccggccggtgaggttacaccgcgtttcaggctcgggttgtaatctttcagtctggaaaccggcatatccagcagctgtgccgcgacatccagggaaatctgctgaccgatattcacccgtgccagggcgcgctctgcatccggtaccggtaaattcacaccgttacgatcactgttgcggataacattgctcagggcaaaaatacgcggcacataatccatggtctctttcggcagggataatgaccagtaatccgttggttttccggcggccgcattcgcttccatcgcgcgcagcacgcggccttcgccgctgttatacgcggccagggtcagtgcccagtctccgccgaacatattattcaggcgctccagtaaatccagcgcggcagtggtggaggcagccacatcacggcggtcatcaacccactggttctggttcagcccgcttgctttgccggtactcgggataatctgccataacccggcagcctgggccggtgaggtggcatgcggattaaaagcactctccactatgggcagcagaaccagttccatcggcatgttacgttcatcgattttaccgatgatccagtacatgtaaggttctgcgcgcagtgtcacatcgtggagatagctctttttggcgaggtaagaaagttcttcggcgcgtatgcggtcattgtccgggatgttcattttcatttcatcgcggatataaccccagatatcatcttcgggactgacggaggatgcctttgctgcgttcatctgccgggccgtcagtaaaaaaccgttaccggaaggataatgagggtcctgtgcagttttctgcggcgcagtctgacaccccgccagcaaaattgcggcggcaaggagtgtagctttgattttcatgttggcggaatcagcattattattcttcagtctgtaggttttgcaatcatactggtgttattccgccctgacaacgattacggctaaaattgatctttttttgcgcgtaaagacgtaaaagtttcctcagccgtcgccgtatgtttacttactgataaattatgttgcagatcaatattatcacagttaagaaaaacattaattttcctttctgttttcagtgtgacgggcagtgtagcttcatgattctgacgtaattctgcaatatattgctgatatgcctgaatatcacggttttccggccagacagcgcgcgcaaaggcgaggttagactgtgtatattcatgcgcacagcagaccagcgtctcatccggcagcgccgcaaggcggctgactgaacggaacatctgtgccggtgtgccctcaaaaatacggccgcagccaccggagaagagcgtatcgccgcaaaacagataaggttcgcaataataagccacatgaccgagtgtatgccccggcactgccatgacctgaaatgtcagcccgccgcaggtaatcgtgtcattatcctgcacgcagtgatttgcgcctttcggctgggtttcggcggggccgtaaaccggcaggccgggataatgtgaaacaatctctgccgtgccgccggtgtgatccgcatgatggtgtgtcagcaggatggctgaagggatcagtccccgctcccgcagtgtattcagtaccggctcactgacgccggggtcaacgataatacaggtgtgcgcattatcccgtaatagccaaatgtagttatctgataacgcggaaattctgataagctccatagatacctcacctttctgagtgtgaatcaaggataaagccatgttttctgcacgagcgacaaaaactctgatgatgccggactcgtggtgcgatattccctgcgggcgccgcttccggcaatcgctggaagcacagctggcgccctggtggccgaaaatgtttggttttcatctgattaagatcggcgcgctgagctgtgaaattgacagcagcagctgcatgatcccgcatcaggtgaatgtggcaccgcagggtaacaccttacaggtattcggggaggcggcgcaattgccgtttctcgacaaatccgcggatgtctgtgtgctggcacataatctgggctacagcagtgatccgcaccggttgctgcgtgaggctgaccgtgtcctgattgaggacggctggctgattatcagcggatttaacccgctgagcctgctgggggcacgcaaactgatcccgtggcgtctgaaccgggagccgcagtgcagccggatgttttcacagttccgtatgctcgactggctcagtctgcttaattacgaaattatgtatcaccggctgaccacgccgatcccctggtgtgatccggcaagtttcggcaaccggcatgcgcggattttcggctgtctgggggtgattgtggcccgtaaacgtacggtgccgctgacgttcacaccgcagaagctgcgcctgctgcggccgaaactgaacaatgtggtgggcgcgacacgccagcagacgccgccgcgctgtctgaaacggcgctgaggattattccgttgccggctgataaccggtatcgtcctgtgacggggattctgccgctgcacgggcgagttcatcacagcgctcgttttccgggtgccctgcgtggcctttcacccactgccagtcaatctgatggcgggtgatggcggcatccaggcgctgccacaaatcgacattcaccaccggggatttatccgctttgcgccagccgcgccgcttccagttatggatccactgcgtgatgccctgacggacatactggctgtcggtggtcagcacgatatcacacggacgtttgagggtttccagcgccacaatagcggccagcagctccatccggttattggtggtaagaaaaaagccctcactgagtgctttctcatggcctttataacgcagcagcgcgccgtagccgccggggcccggatttccgaggcaggagccgtcggtgaaaatttctaccttgtcactcatctctggtagactcttcctctgattgattggcaattacctgagtctgacacaaaacgccattatgagcactgatattacacgacaaattgttctcgataccgaaaccaccggtatgaacaaactgggtgcccactacgaggggcacaatattattgagatcggtgcggttgaagtgatcaaccggcgcctgaccggccgtaacttccatctctatatccggcctgaccggctggtggacccggaagcctttagtgtgcacgggatcagtgatgaattcctgatggacaaaccggtttttgccgacattgcggatgaatttattgaatttatccgtggtgcggagctggttattcataacgcgcccttcgatatcggctttatggattatgaattccgcaagctgaaccgggggatcccgccgaccgccgaattctgtaccatcactgacagcttaacgctcgccagacagcttttccccggcaagcgtaataacctcgatgccttatgtgatcgctatcagatagataactcaaaacgtctgctgcacggcgcgttactcgatgccgagattctgtcggatgtttatctggcaatgaccggcggccagacatcactggctttttcagcggataatgagagcagcggcgaagagaacgttcagactattcagcgcgttacccgcccgcagagcggtctgcgggtggtatatgccacggatgaggaaattgccgcgcacgaggcgcgtctggatctggcggagaaaaaaggggcgaacccgtgcatctggcggagctgactgcctgccgcagtgactgtggtgcctgctgtactgcgccatccatctcatcaccgattccggggatgccggacggtaaacctgccaatacccgctgcgttcagttatcggagcagaatttgtgcctgattttcggctcaccgctgcgtccggcggtttgcagcggactacagccctcgcgggaaatgtgcggggatagccgggatgaggccatgatttatctgcttgatctggaaaaacaaaccgcgccctgaaaccggatgagcgcgttgcgggagaccgtgtgtcgtgtgcggtgacccgtataaaacagtatattcaggtgaaaaactgtgcaattgcatggatttacacaaatcaggtattgacgaacgggaaccggcatcgtattatccgcaccgttcccgaaaaggaacacacggagcggtagttcagttggttagaatacctgcctgtcacgcagggggtcgcgggttcgagtcccgtccgttccgccagattacagaagccctgacagtaatgtcagggcttttctgtttttacactgcacaatcgccctgtatcattatcatcccccggtattacctctcttatcattttgataatgcgttgtgaccacactcatactttatgtgaataaataatgttcaggtgctggcacatatcttgctgtttgttttccgtaaccggttgcgcggccgtcgccgctgtgccggtaaaaacaataaaaccaatcacagaggttgtatttatgaaaacaaacaccgggagtgatgaagtcaatgaaatgatgccgatgcggaaactgtttccgtatgctgttcagcatatttttgccatgtttaccggcaccattgccgtgccgatagtgatttcccaggttctgaaactatcacaggaagataccaccctgctgattgccgccgcgatttttgtctccggcgtggggacacttatccagtcactgagtatcaccaaatacgtcggcgtcagtctgccgctgatcctcggcacctcgtttgtggcgatgccgccggtttttattatcgcctcgcggttcggcggggggcttgaatcgctgccttatgtcttcggcggaaccctggtctccggggtgctgctgttcttcctcgcgccgctgtacggaaaaatcgctttcttattcaaaccgatagtcatcggctgttatcttataatgctcggtgtttccctgctgccggtttcgttttccggcattgtcggctatccgggggatgcctcctacggcgacccggccggtatttttctcggtgtgctgactatcgcggtaattgtgctgttaaaccgcttcggtaaaggcgcgttgcgggaaatgtcgattctgatcggcctgatcgtggccactttggtcgcggtggtgatggatatggtcaatttcggccctgtgagcagtgccgggtggttttcgtttgttcgtcccgcctattacggcattcagtttgatctgaccgccattattctgatgttcctcggtacctttatggccactctggattctgtcggtactttctccactgtcggccgcctgtgtaaccgctctatggaaggtaatgccctgaactctccgatgcgcggggaaggggtggcggtgaccatttccgggctgtttaactgtacgccgctgacctcttttattaacaatgcgggggtgattattatttccggtgtgcgcagccgttatgtaaccgcgtgcagcggtgtgatcctgattatcctcagtattattcccaaattctccgcaattgcgaccatgatccccgcttcggttttcggtggtgcgaccctggtgatttttgcctttattacggtggcggggatagatacactgacaaaatctgtcgatatgaccaaaatgggcaatatgatggtggtcgggatttcagtcagtgtcgggctgatgtttaacggtcagggggaagccctttctcagctgtcggaaatgctgcggattattctttcccagggcgtgatagtgacctttgttctggctatcgtgctgaatcttttattcaattttgacagtgtcgtcggtaaaaaagagaaaccgtaatatcttcgtctgccggtaagcggaatttttccgctgccggcaggaaactcccgccatccgccggataagcgcacagaatgcggtatttccgcttgctattcattgcggtaatcgggtttaataggtcacttccgctgttgcgcaatacctggtgctaaaacgatttagtcagcgaaaatgccgcctgtgcgaagtattgtttctgtcctcagacacgcctcgcctgacgtctcattgttgccttttcagccccgaccctttgcctctgaccggtgataaggattgccatccgtgcgcggcactgcgaaaatagcctgtatctgctttttatccgaacctggagtagacaatgacctctcgtaaaactcttgctaatgcgattcgtttcctgagcatggacgcggtgcaaaaggcaaattccggacaccccggcgcaccaatgggcatggctgatatcgcggaagtactgtggcgcgactatctgaagcacaacccggccaatccgcactggagtgatcgtgaccgctttgtgctgtcaaacggccacggctcaatgctgatttacagcctgctgcacctcaccggctatgatgtatcgatggatgacttaaaagccttccgtcagctgcattccaaaaccccgggtcaccctgaatacggctacacaccgggtgtggaaaccaccaccggcccgttaggccagggtatcgcaaacgcagtcggttttgctgttgcggaacagacactggcggcgcagttcaaccgtccggggcacgatattgttgatcatcacacctacgtctttatgggcgacggctgtatgatggaagggatctcccacgaggcctgttctctggccggtaccctgaaactgggtaaactggttgccttctatgatgacaacggcatttctatcgacggtaatgttcagggctggttcactgacgataccgccaaacgctttgaagcttacggctggcacgtcgtgcgcggcattgacggtcacaaccctgaccagatcaaagcagccgttgaagaagccaaagcggttactgacaaaccatccctgctgatgtgcaaaaccgttatcggtttcggttcaccgaagaaagccggtactgcggatgcacacggttctccgttaggtgatgcggaaatcgccgctacccgcgaagcactgaactggccgtatgcgccgttcgaaatcccgcaggaaatctatactgagtgggatgcgaagaaaaccggtgccgctgctgagtctgagtgggatgtgaaattcgctcactacgaaaaagccttccctgaactggcccgtgaataccgccgccgtgtaaacggtgagctgcctgcgcagtgggaagcggatgcaaatgccttcattcagaacctccaggacaacccggccagcattgccagccgtaaagcatcacaaaatgcactggaagcgttcggtaaagtgctgcctgaatttatgggcggttccgctgacctggcaccgagtaacctgaccatgtggtccggctcagcaccaatcaatgaagacaaagcgggtaactacattcactacggcgtgcgcgagttcggcatgtctgccatcatgaacggtatcgccctgcacggcggtttcattccttacggcgcgaccttcctgatgttcgttgaatatgcccgtaacgcggtgcgtatggcggcactgatgaagatccgcagcatcttcgtttacactcacgactctatcggtctgggtgaagacggcccgactcaccagccggttgagcaaatcgccagcctgcgcgtgacaccaaacatgagcacatggcgtccgtgtgaccaggtggaatctgcggtagcctggaaatacgcgattgagcgtaaaaacggcccgacatccctgatcttctcccgtcagaatctggcacagcagccgcgtaccgcgcagcagctggcagatatcgaaaaaggggcgtatatcctgaaagattgcgctggtcagccggaagtgatcctgattgccaccggttctgaagtggaactggccgtgaaagcatacgagcagctgacagccgaaggccgtaaagcgcgtgtggtttccatgccgtccaccgatgcattcgacaaacaggatgctgcttaccgtgaatctgttctgccgtcagccgtgaccgcgcgtgttgctgtcgaagcgggtattgcggattactggttcaaatacaccggtatgcagggtgccatcgtcggcatgcattcattcggtgaatctgcaccagccggtcagctgttcagtgaatttggtttcactgttgaaaacgtggtttctcaggcgaaagctctgctgaaataatctgctgatacagattctgaaagcgcattccggtttttttgaccgaatgcgctttttttatatctgctcctctgactgtcttgcgatcttttttcatttagcataacctgtctttattgagctgaaccgtttcagtttcgaggggtgctgaatgtgccgcagaggataaaaaagattgcggtttctatgataaataccccgtacaaaaacccgtgagtccgttattcttagtccgctgataatttggctatttctgaggatactatgacaataaaaattgcaatcaacgggtttgggcgaatcgggcggagtgtgctgcgggcgttgtatgaaaccgggcgtaacacgcagattaccgttgttgctattaatgagctggcggattccgaaggtattgcacacttacttcaatatgacacaagccacggacgcttttttaaaccggtacagctgaaagaaaaaaatgtgctgaaagtcggtgatgacaccatccgcatcctgcatgaagcggatattcaccagctgccctggaaggaactcggtgtggatgtggtgctggactgcagcggcgtgtacggctcccgtgatgacgggctggcacatatcgccggcggcgcgaaaaaagtgctgttttcccatcccggcggtaatgacctggatgccactattgtctacggcgttaaccatgacacactgacggcgcaggataaaattgtatcgaatgcgtcctgtaccaccaactgcatcattccggtgataaaattactggatgagggattcggcatcgagtccggtacagtgaccaccattcacgcggcgatgaatgaccagccggtgattgatgcgtatcacagtgatttacggcgcacgcgggcggccgggcactccatcattccggtggataccaaactggctgcggggatccggcggattttcccgaaatttgaggatcattttgaggcgatttcggtccgggtgcctacaattaatgtgacggcgattgatttgagcgtcaccgtaaaaagtaatgtcaccacgcaggatgtaaaccgccttctgcaaaacgcagcgacgggggcatttcgtggtatagtggactacacagagttaccgttagtctcggcggattttaaccatgatccgcacagtgctatcgttgacggcacccagacccgcgtcagcggacagcatctgataaaaatgctggtctggtgcgataacgaatggggctttgcgaaccgtatgctggataccactctggcaatggctgaggctggttttcactgagggacggcgtgccccggcagaaaattgaacacaatttaactgataagagaatcaacaagaggattcaccatgtccgtaattaagatgaccgatctggatctggcgggtaaacgtatttttatccgtgctgacctgaacgttcctgtcaaagatggcaaagttacctctgatgcacgtatccgtgcctcgctcccgacaatcgaagccgcactgaaacagggtgccaaagtcatggtgacctctcacctcggccgtccggttgaaggggaatacaacgaagagttttcactgaaaccggttgttgattatctggcagataaactgagctgcccggtgcgcctggaaaaagattacctcaatggtctggagctgaacgccggtgagctggtggtgctggaaaacgtccgctttaacaaaggcgagaaaaaagacgacgaaaccctgtcaaaacagtatgcatctctgtgtgatattttcgtgatggatgcattcgggactgcacaccgcgcccaggcatcgactcacggcgtggcaaaatttgcccctgtcgcctgtgccggtccgctgttatgggcggaactggatgcactcggcaaagcgctggataacccggcacgcccgatggtggcgattgtcggcggttctaaagtctccaccaaactgaccgtactggattctctgtccaaaatcgcggatcagatcattgtcggcggcggtatcgccaacacctttatcgcagcggaagggcacaatgtcggccgttcactgtatgaagatgacctgattccggaagcgaaaaaattactcagcagctgtgatatcccggtaccggttgatgtccgtgtggcgactgagttctcagaaaccgcagaagcggtgctgaaatcagccaatgacatcaaagatgacgagcaggttctggatatcggtgatgaatccgcactgcacctggctgaaatcctgaaaaatgccaaaaccattctgtggaatggcccggtcggcgtgtttgagttcccgaacttccgtaaaggaactgaaatcgtggctaacgccattgctgacagcgacgcattctctatcgcaggcggcggtgataccctggctgctatcgatttattcggcattgctgacaaaatctcttacatctctaccggcggcggcgcattcctggaattcgtcgaaggcaaaaaactgcctgccgttgtcatgctcgaagaacgtgcaaaacagtaacagtcataatcagatgacaataacgggcggtgtgagctgcccgtgacaacttccgaaagaccaatacaggaaatttgacatgtctaaagtttttgattttgtaaaacccggtgtcgtcactggcgatgatgttcagaaaatctttgcggtagccaaagagaataattttgcactgccagcggtaaactgcgtcgggacagactcgatcaacgccgtattggaagcagcggccaaagtccgtgcgcctgttattgttcagttctcaaacggcggtgccgcatttatcgccggtaaaggtttcaaaggcgaaggccagcagtccgctgttctgggtgctatttccggtgcgcatcatgtgcatcagatggcggaacattacggcgtgccggtcattctgcatactgaccactgtgcgaagaaattactgccgtggttagacggcctgctggatgccggtgaaaaacattttgccgcaaccggtaaaccactgttctcttctcacatgatcgatctgtcagaagagtcactggaagaaaacattgagatttgcagcaagtacctgacccgtatggcgaaaatcggtatgaccctggaaatcgaactgggctgcaccggcggtgaggaagacggcgtggataactcccacctcgataactccgcgctgtacacccagccggaagatgtggcgtatgcctatgaaaaactgaatgccatcagcccgcgtttcactatcgcggcgtcattcggtaacgtacacggtgtatacaagccgggtaacgtgcagttaacaccaaaaattctgcgtaactctcaggactacgtctctgagaaatataacctgccgcacaacagcctggatttcgttttccacggcggttccggctctactgcggaagaaatcaaagaagcagtgggttacggtgtggtgaaaatgaatatcgataccgatactcagtgggcgacctgggaaggtatcctgcactactaccagaaaaatgaaggttatctgcagggccagctgggcaacccggaaggcgaagacaagccgaacaaaaaatactatgacccgcgtgcatggttacgtgccggtcagcagacaatgatcgaacgtctggaaaaagcattcaaagaactgaactgcgttaacgttctgtaatttgttgcgtgaataataaaatcgcccggtattgccgggcgattttttttacggattattttttctgctggctttcattccgccggattatcgattcaattaactcatcgatatgaagattgaccagcatctctaccgcgtcactgcgggttttgccggagagcatagataaatgcgctattttccggacggttgtgccggtcagtgacagcgaaaccgccttcttcttctctttatccagtgacactttcccgctgtaatacaccgatttctgaccgttatggttttccagctcttcgctcatctttttcagtgttttgcgatccagtgtgccggagtcagtcatttcataggtatgtgaggctttgcggtagcggatttccgctgaccaggtatcacgtaactctttgaaagtacgggtcagagttgcctctgagcagcggagtgtcgccaggatttcatctgacggaaccggttttccggtaccgagcagggttgccagggtgaataaacgaacctgtcgtgtgcttaattgcatagtctggggacacctgtataaaaacaaagagacaaagccgctgttatgccggaaacggctgttccgcataacagttctatttaatcagctgatcaggatatatcaaggcattcagatataatagtgcaggatattcagtctgatgatatttctgtcctcagtttcacccgttttgtgttttaaacggctgtccgtctgttttccgctgtgcgatcccgtacacccgtgcacgggccagaatggcagatgcccagcgccggtgtgtcgccggttcgcacatagctcccagtgacttgaataccgcctgtgtggagttgaggatccgcagtgcatccgcgtgctcatcagcggagacccgcagcgcctgctcaatcactgccacctgattcgggtggatagcagttttacccaccagtccgtgagcgatatccagcgccagttcccgtgtcatgacatcgtgatcatcaatatgctcgcagaccggtgcggtcatggcgaaatcgtgcggggcgaaaacagagaccagcattttaatcacataacccatcgggccgtcatacagggtgagatgacgcgggcggcgcagggaaatcacattcatcagatcattgccgccgatacgcagtgcgatgattttgtcatggcagggatgggatttaagtacctgcgccagttcccgcatctgcaccacatcacagacttcttctgtttccagggtcggcatcatacacagcggggtgtttttcaccaccagccaccagaccggcagcgttttctgtgtgaacttaggcagcaccagcccgtcaacggcactgagatcgcagtgctcgcgcagccacaatcccatttccgggtgacgcggacggataaacaccagcggccagttctggtttccggcacgctgtttttccgctgtcagcgcggccaggatgccctgtaaattctccagtgcctgcgggatatccgcctcactgaccgcatcttccagacaaataatcagtgaacgcagtccgctgattttattactgataatcgcatccgtgatatcggtgcgggtggcgggcatatagagtgaggcccctaaattccacggggagagacgtcgggtcatggtgataccttcctgataatagtgacggcgcggtactgcccgagggcatcgccggcttccgtgatagtgatccctttctgacgggcgagataaagcagcaattccacatccggctctgtgcagtcgcgcacaaagacgtgatccggcacccggcgcaggacagcacgggtggcttcggcaataccgggtttgattctgttcagatcgttgacaccacagcgttcagccagtgcagtgatcaccgcacggctttttttccgcagtgctgttttggtgtccggctccgggaaggccgcagccggagccgcggtttcctgacggcgcagcgcggcaacagtatcggtgagtgtccggctgcactcataaggttgtaaatgctcacaatgcacacagccgtgcggaccggtatatgaccagacagagcgggagatcagcccggaaaccggcgcccccataatcccggaggggatcagccagtcatcatcagcagcggaaagccaggcgcatccggcaggatcggccagcaccaccaggcgcggatcgaccgggtagccgggtctgtctttcagggagcggatcagttcaccggtgatggcgcctttacctgtccagccgtcaacaaacacaataccggcggtgccgtgatggtgttcgatccactccagcgccgccgtatcaataccgcgatcgcggataatactgatgccgtaatggtgtgagatttttcccgcatcacgcagcgcctgatgcagcatcacccctaacggcacaccggcgcggaccaggctgaccagcacaaccggctgatctgcaaaatagtcacccagtgtacgggcgagggcgctcacatcccgcgccagacgcggtgcaccttttttcagtgcgcggttaaacagatcaagatgccagtctgtgggagcgggctcctggctgagcatatcggaatagtgtttctgtccggactgaataagctgctctttcagttccaccggggtcatatcaatggtgaccggccggagcagaaactgcacatcatccggcagataactgcctgagaacggcaggaaattatacataggatacctcactgaaaatccgggcggcgactgcctccgcaaactgactgcgggacggcatcccgaaccaggtacagtgtttcataaagcggtaatcactcaggctgtcgccgaggccgataactggaaaggtgccgcgctctgcccgtaataacgtcagcaggtacgtaacagcatggcctttttctaccggatccggcagccaggcgatattgttgccgttgcggtggatgtaaaatccgtctgccggaaactgttgttcaatctctgcggcaacggcatagagttccgctgtgcgggtactgtcagtgtgtttcatcaccagatagaccggcacatcatcgtattcataattaatgcgcgcccatgcatcaataccgcgctctgtcattcgctcagtacaaaactgctgaagtgacaacagccgttcacagtaagggccgagggcggtcagcatttcagactgccagccgggttccggcgaaccgtccggtcgcaggatcaccgcgccgtgcgtggttatcgcataagagcggaacgggatagtgacgcggcggagttcctccgtaccgcgtgccgtaaccggaatgagatcggcatgcgccagcagccagtctgtcagcatggcctgttcttccgtcataaaactgcgcggttgtaatgtgcggtcaaccgcaccggtgcgaaacggcgtaagtgcctgctcctgtgtcattttgcgttttgtctggaacagggtgtcatccaggtcgctcaggatcaccggtttagtcgtcataaatcacctccgtcagcggcgcacagcgggccagcgcctgtaataactgcggatcaaacgccgccggatccgtttctgtgcacagcagaatgcggtcaaatgactgatgtgccacattgtagagataattggggatccccagcccgtagttatccgtgaaggaaataacggattcaatggcaccgcccggggctatcggggagcgggtcagggcgctgaattttacatccgctccggcctctgccagccgttcggccagcaggaacggctgccagacaaactccccggagccgagcaccaggagccgctcaccgggtgcggtcgtcaccgtactgccaaaaccggtgtgcggatcatgcagaccgagccgcacccgcgtcagcggacggcggattggcacggctcccgcagcgctgacattcacatccggcatctccggcagggccgcatccggatcagcttcccagcgccagctgccgctgatcagagagacatgccgcaacggcagcccgtgctgaacagtggccggatcctcacgccagtccgtcagtgtgacagtcacaacctgttgtaaatcaggcagctgaccgctttcatgcaatgcagtcagcaaattggtaaacgtattgccggtggtcgcttcatcatctgccagcaccagggtttttgcctgttgcagccgggttttcagctgcggatcggccgggaaatagagcagatgatccgtggcgtggctgtgattttctttaaattcacacagcagttcaccgtccgccggatggcgggtggaagagagatacagggattccgggtactgacggcggatttcgctgtatacgccggctcccagaccgacagcggtttccgccataccgataaccagcagcggctgcggcagatcctgcggaaactgctcactgaggcggcggtaaacaccgcgcatgatttccggctcgaccgggatatgacggcccagcactttgctgacaaacagaaatgcccgtttcgggttacgccgctccgcaatcccgaacagggcgttcagggtttccgggctggcgtcgctgcggacttccagcgtgccggtggtcagggtgaaccggtggtgaccgggacgggaaaaaccgggcatagtgacctcagtgtattgcattgttcagggaagacgggtagctgacggcttcggtcagcgggcggacaattgccggacggaatgcagtgcggttatattctctgacctcatccgcactgagcagcccggtactgtacagggcaaacaggcccggcagattcaccctgctcagcgcggtataaccgataccaccggacggccgcatattgatttccagcagcagcggctgcccgtgatggtcatggcgggtctgcacattcaccagtccgtcggctttcatcacccgcgcacaggcgcaggccagctcaaatgcagcaccgtcatgttcaaggtattgcagggagccttctttgcgccgtgcaacagcagccagcacctcaccgttatccgccagaatatccacggaatactccgggccgggcaaataaggcatcagtacctgcgcggggcatttgtcagcgctttcaagggcggacaaatactgctgcggtgtggtgatccgccgttcagggtttgtgaacatggccatcggctgtgcgttgtcatcaaactgccagaaaccggcaccgtaaataccctgaaccggtttaatacacagcggcagccccggaaacggggaatgagcgagtgcatcacgcaattgcgccgcagaggtaatctgcacagaaggcacaaccggcaggccgtgtgatgccatctcagcagcaaagcggactttatcatccgccacggcgtaatcagacagagaggcgacaccggttatcagccgggggccggaagccgtgatagtgtttctgtgcgtttcaaaccacgggatattccgcccggcgtggattacctgaataccgtatttctccgtaacagacaggataaacgccagccgctcattttcatcagccggttcagtcagggaaaaatccgcctctgacaggatctcatggcggggctgccggtgagaggcaaaaatcgtgagatcaacctgtaatgtctgtgcgaacagcctgatattccggatcaagtcacgctgagaagagagtccttccgtcagccagatcgcatgcaccattattgtttattcctgttctgttttatccgatagattaggagcgagtttatttaggattaatttacatgtcaatcatattatgattgtgtttaaattgacaatccgctgactaaacctgacattggttataactgtgaatgtcattatttctatattaactatatgtttaatctgcattattaatttaattttaaatatatcttgccaaagaactccgtcatgatatgattttttaaaattcattatcaccagcacctgttgccgggttttatctcccgtttaaggaatgaaaatatggtttcattgacgaagaatcagacggtatctctcagcaaggcatctgccgcattaaatcagctgcatttcggtctcggctgggatcctgttcagaaaaagaaaggttttctcggttcgctgttcggcggcggtaacgactccattgatctggatgccagctgcattctgctggataaaaacggccgtattctcgacaccatctggttccgcaaactgaaatcagactgtaaatccgtgatccacgaaggggataacctgaccggtgagggtgacggcgatgatgaagtgatccgtgtggatctgaaccgtctgccgcagaataccgaatatctggcctttacggtgaacagcttccgtggtcagacatttaacgatgtggaaaatgctttctgccgtgtgctggatcagagcggtaaagagctggtgcgttatcagctgaatgaacagggctcacacaccggtatcgtgatcgcctctctgtgccgcagcggcggtgagtggaactttaccgcccacggtgctgcatgccgcggccgcacgattgacgacatgtcttccgacatagtcagtacggtggtgcgctgatgaacatgacgcccggggcgaatgcgcccgtaccgctgaaaacactgcggattacggtgctgtccggtgcggcggcggatgcctctgcgttccgtctgtatgctgacggcaaagtgcagggcgatccggacatggtcttctacggccagccgcagaatgatgacaacaccatcagctggcagcagaacggcaacaataccgtctttacggcggatgtcagccgtctgcgtcaggatgtgcagaaagttgcgtttgtggtcacctgtgacggcgggcagactgttgccggtctgcgcagcctggaagttcaggttgaggcggatcatgaaaaactgctcagcggcattgtggacaccgccggtcgtcaggaagcggcactgatcctcggtgaactgtaccgccgtaataatgagtggaaattccgctttgttgcccagggcttcaacggcggactgaaaccgctggcggagcacttcggggtggatgtggcggcagagtccgcaccggcagcagcgcctgcaccaaaaccggcagaaagtaaaatcagtttaagcaagatatcgctgagcaaagaaaagccgtcaatcagtctgagcaagcgggataacttcggtgaaatccgcattaatctgaactggcaccgggacactcagagcagcaactccgggggcttcctcagcaatgtgttcggtggcggcaacaaggggattgacctggatctgggcgcattcgttgagttacagaatggtcagaaatcggtgattcaggcgctgggtaatgcatttggtgattaccggcgtgaaccctttattcagctgcagggcgatgatcgtaccggcgcggtttcagaaggtgagtggctgcatatcaacggcggcgagtggaaacacatccgccaaattctcatctacgcctttatttatcagggcgtaccgagctgggacaaaacagatggcgtggtgacggtctttgtaccggagcagccgccggtggaaacccggctgacagaaggggacgaccgccgcaccatgtgcgcgattgcccgcctggtcaatgagaacggggcgataaaagtcgaacgccttaaccgtttctttaaaaatcaaagcgatatggatgaagcattcgggtggggtttccgctggaaagccggctcgaaataatttaagtgaggatacagcaatgagtatacttaaccgggtcaaaagtgcgtttaattcaggccgcgaagagctgacaaaacaggtcagccgtttcagaaaccgtaagtttatggaaggtacgatcgctgtctgtgcccgtattgcggtttccagtgacggggtcagtgcggaagaaaaacagaaaatgatcggttttctgaaatcctctgaagaactgaaagtatttgaaaccgaagaagtcattacatttttcaacaaattggtcaccagtttcgatttcgacatggaaatcggcaaaggtgaaaccatgaaatatatcctggcgctgaaggatcagccggaagcagcgcagttagcggtgcgtgtcgggattgcagtcgcgaagagtgacggtaacttcgatcaggatgagcagaaagcagtaaaagagatcgccgctgctctggggtttgacccggcagagttcggtctctgatttttatacctaagggttaattatggaatcaacacatatcggttttccgatggaaacagtcaccgttttcgtcatcctcgcaatcggtgcgatttttattgatttgtttatgcaccggggcgataagccggtttcactgaaaaatgcggcaatctggtctgttttctgggttgctgtggcaatgggttttgccgggtttctctatatccaccacggttcggaagttgcgagcctgttcgtcaccggttatgcgcttgagaaagtgctgtcggtcgacaacctgtttgtgatgatggcgattttctcctggttctcggttccggatcgtttccgccaccgggtgctgtactggggcattatcggggctatcgttttccgcgggattttcgtggcgataggtaccggtctgctgagcctggggccgtatgtggaagtgattttcgccctgatcgtcgcctggaccgctgtcatgatgctgcgtaaccgcgaagataaggaagagattgaagattactcgcagcacattgcttaccggatggtgaaaaaactgttcccgatctggccgaaactgagcggacacgccttcctgctgacccagaaagaagtggatgccgagctggcaaaaccggagaacaaggacgtcactatcggacgcggtaaaaaagccgctctgtatgccacaccgctgatgctgtgtgtggccgtggtggaactgtccgatgtgatgtttgcgtttgactccgtaccggcgattatcgcggtgagccgtgagccactgattgtttacagcgccatgatgttcgcgatcctcggcctgcgtaccctgtactttgtcctggaagcactgaagcagtatctggttcacctggaaaaagcggttattgcgttactgttctttatcgcggtgaaactgggtctgaatgcgacagacagcctctggggtcacggattacatatttcggccaccagcagcctgttcgtggtgctcggggtcctggcactgggtattatcgccagctttgttttcccggaaaaaacggaaagtgcggataagtaattatccgccacccgtcactgatttaactaaggagtaagtgaaatgagcgtttctctttctaaaggtggtaacgtgtcgctgagcaaaacagccccttcaatgaaaaacgtcctgattggcttaggctgggatgttcgttccacagatggtcaggatttcgaccttgatgcctctgcctttctgctgaccgccgccggtaaagtgcgtggcgatgcagactttattttctataacaacctgcgttcatctgacggttcagtcacccataccggcgacaaccgcactggccagggcgatggtgatgatgaatctctgatcatcaaactggatatgattccggcggagatcgacaaaatcgtcttcgtggtcactatccatgacgcgcagacccgccgtcagagtttcggccaggtatccggcgcatttatccgcctggtcaatgatgataccaataccgaaatcgcccgttatgacctgactgaggatgcctccactgaaaccgcgatgctgttcggtgaactctatcgtcacggagccgagtggaaattccgtgccgtcggccagggttatgccggtggtctgtcatcagtctgtgcacagtacggtatcaacgcgtcctgagtatttttttcagcgggctgataaccagccctctttataatccgcagcaggagtccgaaaatggcagtttctcttacaaaaggtggtaacgtctccctgaccaaagaagccccgtcaatgagcgtggcgatggttggtctgggctgggatgcgcgtgtgactgatggtcaggattttgacctcgacgcatctgtatttatggtgggtgacgacggaaaagtattatccgacagccatttcatcttctttaataacaaaaccagcccgtgcggcgcggtggagcaccagggcgacaaccgcaccggtgaaggcgacggtgatgatgagcaggttaaaatcagcctgaacacccttccggcagatgtgaaaaaactggtcttctccgtcacgatttatgatgcggaagcacgtaaacagaacttcggtatggtcagcaacagcttcatccgtatctgtaacaatgataacggcagtgaaattgcccgtttcgacctgtctgaagatgcatcaacagaaaccgcgatggtcttcggtgagttgtaccgtcacggtacagagtggaaattcaaagccgtcggccagggcttcgccggtggtctgtctgcattagcgtctcagcacggtgttaatatttaattattgatatcagctggttgccgtaaaaaatgccctgtccgtgacggacagggcatgctgcgtttacaaatccggccgggagattactcgactcctgctgcctccccggccggacggcgcacatcgttggcaccgtataaatagccttcccgcaccttaccggacacggcggcatcattgccggaagagtccgcactgactccggcggcacccggtaaccccaccataatcagctcggcggcaccccacggtgtctgttcaaccatcttataacccattttatccagcagattcagtgagtcttttgacacaccgcgctgctcgtaatacacctcatccggcagccactgatggtggatacgcggcgcattcacagcttcctgcggtgccatgccgtgatcgataatattcagcgcggtctgcagagtgatagagatgatccgtgagccgcccggcgaaccgagcaccaggaaaatcttaccgtctttggtgacaatggtcgggctcatggaggaaagcggacgtttgcccggggcaatcgcgttgcgctcaccctgaaccaggccgtacatattcttctcgccgattttggtggtgaaatcatccatttcatcattgaggaagaaaccggtacccggcgggatcaccaccgcaccgaaacgaccgttgatggtataggtggtggaaaccgcattgcctttattatccaccacggaatagtgtgtggtttccggtttttcatgcgggcctgtacccggctgcacctgagcggaaggtgtggctttgcccggaatgatttctttgcgcagctcttccgcataggctttgctggtcagtttttcggtcgggtttttcacaaacgccgggtcaccgaggaaggtgttgcgatccatatacgaatggcgcattgcctctgtcagagtgtgaatataatccgccgagttaaagcccattgctttcagatcataaccttccagaatattcagggtctggcagatagtcacaccaccggagctcggcggcggggcagatataaattcatagccgcgataggtacaggtgaccggcgcaacctcagaaatagtgtaatccgcaaaatctttggctgtcagcttaccgccgcctgcctgagaggctttttccacgatttgcgggatttccccttcataaaaggcgggagggccttctttggcgatgcgctccagggtattggccagatcggtctgaatcagccggtcgccgggctggaatgcggagccgtcaggtttaaggaaaatccgcgctgcttccggatcctgcttaaagcgggcggtggtggtgtccagcacatcggtatctgcgcgggtcaggataaaaccgtcacgggccagttttatcgccggagccatcacctgctcccgtttcatggtaccgtatttttccagggcataatcaagcccttttaccgtacccggaaccccggcggcgagatagccgtacaggctggcatctttgatcagattgccgtctttatcgagatacatatccgcagaagcggacgccggggctgtttcgcggaaattgatgaaaatattttttccgtctgccagatgcagggtcataaagccgccgccgccgatattaccgcagcagggattcaccaccgcctgagcgtagccgacagccactgcagcatccaccgcgttaccgccggctttcagaatatcagccccggcctgtgacgccagatgctgggaagagaccaccatcccgttgcgggcttcagcggcgggttcggaagcggcatacaattgcggggaaagcagcagagagagcagaagaacaggtgttcgccatggggttatcattattatctccgttgatcgtgcagggttttgtatgagggattgattgactatttgttaattaatagttaattaacgtatagcagggatagcaatatttgagaaatggcgtgcgggaaaatgtgaaaccgggcagaaaagcaggacggggagataataaaaaacccggatagcccgggttatgcagaacagcgtgtcattacgcaaacgagacggaaaaccggtgccgccgcaccggttaacacaatcaggctgttttttcttctttcatgattttgttcagtttcggtacgatagcccacataatcaggccggcaaccgccgttgcgataccgattttaccaaacacatcggtgtagataccgagagtctgaagcggatcagtcacgccttccggtggtgcggtaaaggtcgccacgtagccgcccagcagtgttgccattgcctgggtcaggaaccacatcccgagaataaagcccatcaggtactgcggaacgaacgcagccaccatcgccagacccagcgcactgatcatcagctcaccaactgcctggaagaagtaaaccagaacgataaaccacggagatgtcagaccggacgcatcggcaaaccacataccggaagcagcggctgtcaggaaaccggcggagcagcagaacataccgatggtgaatttacccggcatggagaagtctttgccgcgtgcgcccatcttgctgtagaagtaagccagaaccgggctcagtacgatgatccagaacgggttcagtgcctggaagctgaccggatgcacatcaatacccataatggtgtgatgtacgttatagatagcgaagaagttcagtgaagtcggcatctgggcatacagcacatagaagataaccgcttccagcatcagaacaaacgccacatacatcttgttccgctcaacacctttcagtttgaaagcttcgcggaagaagaagaagataaccacagcggtgacgccgagtaacacatagttggcaataatgacgttgtgcagtaaccatgcacacaggaaaacagttgccacactaccggcgatgacgaccagcaggctgccgaattttattggtttgtgatccggctcggaaccgatattacgcaccattttctgacagaacaggaagaccgccagggcgatcagcaggccgataccacagatgttataagtaacggtatagctgtatttgtccgcgataaccggtgccagtgacagggaaatcagagagccgatgttgatcgacatatagaacagggtgaatgccccgtccagacgcgggtctttcggcggatagcattttgccagcagactggccgggttggctttgaataagccgttaccgacagcaatggtacccagtgcgtagaaaatcagatccgggtgcatgatagacaggccggtcataaaataaccgacagccatcacgatggcccctaagatgatggtccgtttggtcccgaggacgtggtcaccgacgtaaccaccgatggagatcagaccgtataccagcgcggcgaatgccccgaaggtgatgaatgcctgttcctgactgaatcccagtttctgaacaaagtagacggccaggatgccttgcacaccgtaatagccgaagcgttcccacagctccacgataaaaatcatgaagaatggcttgggttggttaaacaaaccaacctgcgcgggtttactcatggtttaatgcctcttattaataattattcatcacgcaaaagccttcccggcatcgcggaggcaaagctaaaagataaactcttgcgtaaggttgagtgtttgcgtatttgtcagggtatttgccaaagggctcagactaatatattgctgtctgagcatctcaaagacagatcacacttactgcaataattaatatcataattgaaataaaattcattagattgacatcaataattagtccgcaatggttttgttgatggcgtattgagcagattgatggttatttattctgttgtccggaggggggcggaattaaatatgacaaactgtaacaggtatttttctgatgaataatgattcgttaacacatgatgtgttaacgaatattatgacaataatgaaagaggatcaggcaactgcagcagcggggatatcaccggtttcgacagtgcggaaatcgcggcggaagtaaatcaggccgtgaccttcgtcgcggacatcaatattgctgatctctgccataaagatattgtgtgtgccgatttcctgcacctgagtcaccacgccttccagacaggccagtgagccgtgcagacaaggttgtcccagcgctcccggctgccagtgatcaccggcaaaacgcgcgtccatactcaggccggtcatcccggcaaaatcacacgccagtgcctggtgttcatgggtgagcacattgacacacaaacgtccgttggctctgaacacctcactgagcgcactgctgcggttgatgcacaccagcagggtcggcggcgtatccgtgacagagcagaccgcggtggcggtcagcccgccgcgcccggcgtcgccgtcggtggtgacgatattgacggcagcggagagtgtcgccattgcgtcgcggaacaacagacgctgtgaattatccaaagacataccaactcccggtgggataaaaaatgtgacgcaattgttgcttatttgcgaatgatacgcagtctaatgatagccggggaaaaatacaagggagagtcagaaaatgcggctgccggaaggacagccgcaggcggtggtcagcggggattaacggatcccgccgaagcagaggtatttgatttccagatagtcatcaataccgtggcgggagccttcacggccgaggccggattgcttgataccgccgaacggtgccacttccgtggaaataatcccttcattaataccgaccattccggcctccagggcttcagccacgcggtagacccggccgatatcgcgggaatagaaataagcggcaagaccgaactcactgttatttgccgcgcggatggcttcttcctcatcgcggaaacgcaccagcggtgccagcgggccaaacgtctcctcgcgggtcaccagcatgtctgaagtcacaccggtcagaactgtcggctcaaaaaatagtccgccctgtgccgccggcttcccgccgctgagaacagttgcacctttgctgatcgcatcggcgatatgctcactgactttgcggatagcagcctcattaatcagcggcccctgttgtgctttttcgtcggtgtacggcgcaacatgcagggcactgacagccttcgccagtttcgcggcaaaggcatcatacacgccttcctgcacatagagacggttggcgcagacacaggtttgcccgctgttacggaatttggcggccatggcaccggcaaccgccgcatcgagatcggcatcatcaaacacaataaacggcgcgttaccgcccagttcgagagagagctttttaaccgtctccgcactctgcgccatcaacagcttgccgacacgggtggagccggtaaaggagattttgcgcacgaccgggctggtggtcagttcgccgccgatagccgccgcatcaagcccggtgacaacattgagcactccggccggaataccggcctgttccgcgagtgccgccagcgccagagcggaaagcggggtttccgctgccggtttcagcaccatggtacagcctgccgccagtgccggagcggctttgcgggtgatcatcgcattcgggaagttccacggtgtaatagcaccgaccaccccgatcggctggcgtatggtggcgatccgctgtccgctctgtgtggccggaatggtttcgccgtacacgcgcttgccttcttcggcaaaccattcaataaagctggcaccgtaggcgatttccccgagtgattccgccagtggtttgccctgctccagactcaggagttgtgccagttcctcctgattctccatgacaagaaaaaaccagcggcgcagtatctgcgcacgggctttggcggtcagggcgcgccagcccggcagggcattttcagcggcggcaatggcaagccgggtttcgtgtgcgccgaggtcgctgacgcgggtgatcagtccgccggtggccgggttggtcacatcaaacgtggccttatcctgtgcatcggtccactgaccattgatatagccgccggtgcgcagcagggaaaaggaaggatcggttaacgatgaggtgaacatagagagctccgttgcgttttctcaaaaaagtgatgagggcactgagatatcagcagaagaccattgatttattgttaatatggcgttaataaaaggagagtcctttgggtcttcgtgactgatatgctttttattctaacagaggatgtctgattgcgcattttcccgataaaattgcgcctttttttgataacgtcgatgtttatgatgtgagtacatcgcggagaaattacccattatgcatgaatcattacttatcgcccttttgcaggcccgtgaagtggtcctcggctactttcgcccgaccctgaaagcacaccaactgacggagcagcagtggcggatcattcgcatactggctaagaccccgtcgctcgattttcatcttctggcacagaaaagctgtattctgcgtcccagcctgaccggtattctgacgcggatggaaaaagcgggcattatccaccgcctcaagcccctcagtgatcagcgcaaactctacctctccctgactgacgaaggcatggcactgtatcaccgtgtgcaggcggaagtggagaccggctatcaggcgctggaattacagttcacaccggagaaggtacgccagctctatgcactgctggatgacctggttgcactgccgcagcgcgacaacgaagaagaataaaaaaaggccgctcagatgagcggcatttttacagtgacaggcttacttcttgccgagcagatgcaggaagtgaatatgtttttcgtactggtcaaggatgtcatgaataatctgctccttgttccagcccataatgtcataatcctgtccgccctctttcagatggatttccgcgcggtaatagcggtgttcctcatctttttcctcgtcggtcataccggaaagggcaaaggacggctgattgtaatagcgcagccgggtttcatagataaagttcatatcatcccccagatcgacctcaaaggtgatccggtcgtcgcggctgcggtcgatatggctcggtgtgctctgtttttccagctcctgagacaccatgtccatcgcctctgacaccacttcatcaataaagcgtttgaccagcgaacgtttcgggaaatagccgatattacgcagacggcgctgccacgggatcgggttgcggctggcggtcggtgcaatggtcgccagttgctgactgtcgcgtttatgcacatcaatccgcagggctttgatcagtccgtaaatcgagaacagcagcacaaccgcaaacggcagggcgctggcgatagttacggtctgcagggcggataatcccccggccagcagcagagtgatcgccaccacgcccatcagtccggcccagaagatccgctgccagaccggcgtgtgggtatccccgccggaggccagggtatccaccaccatcgcgccggagtcagcggaagtgacgaagaagacaatcaccatcagcatggcaaagaaagagagcaccgtggagaacgggaaatactcgaggaactggaacagtgccagtgacacatcctctttcaccaccgcggcgagggcggttgcaccctgatttttgatcagatcaatggcggtattaccgaagaaggtcatccacagcagggtaaagcccgccgggacaaacaacacgccgaagacaaattcacggatggtgcgcccgcgtgaaatccgcgcgataaacatcccgacaaacggcgaccacgacagccaccagccccagtaaagcagggtccagccgcccagccagtcgtctgacttcggctcataggcaaagagattaaaggtattactgacgatttcagaaagatagccgccggtgttctcaacaaaggatttcagcagcagcacggtcgggcctaatacaccgaccataatcagcagcagaaccgccaggccgaggttcagctctgacagaaaacggatgcctttatccagaccggacacaaccgacagcgtggccagtgaggtgatcaccacaatcagcaccacctgaacagtttctgtctgcggcaggccgaacagatgattcagcccggcattcacctgtaacacgccgaagccgagggaggtcgcgaccccgaataccgtaccgaccacagcgaaaatatccaccgcgtgaccggctgcgccgtaaatacggtcaccgataatcgggtagagtgcggaacgcagtgtcagcggcaggccgtggcggtagctgaaaaacgcaaggatcagcgccacaaccgcgtaaatagcccaggcgtgtaacccccagtggaagaaggtcaggcgcatggcctcttttgccgcttcaaccgtttccggtgtgccgacaggcggggaaagataatgcatcaccggctcggcgacaccgaagaacatcagcccgatccccattcctgcggagaacagcatggcgaaccaggaaatataactgtatgccggacgggcgtgatcagggccgagtttaatatcaccgaaacgggacaaccccataaaggtgacgctcagtaaaatcagggcgacagcgaggatatagaaccagctggcatttttaaacaggctggtctgaagggctttaaggtgtatgtccgccgtttggggaaacagggcggcaaagccgacaatcaggagaataaccagggccgaaatataaaaaaccggcggattaatcttcattttttttgcggattgttcagtgtcctgatgactcatgaattattccttttatcagttgcagataacgccggcagtaaaaaggggagaactgcatcaaagcgtcagattttccttctgaaaacggtacgcggctgcgcagcggtaaatagaaaccccggcaaaatagtgtcagcgggagatcagaaaaaacggagatgaatacaggctaaacctgcggaaaaaaagcggtgatattagattttattcccccggttggtgaaaaaaagaggattatagtgccaaaaatgtcactctgcggcaagtcacggggtatttttgcgggaaaaagagatatttttatctgtgaattttatttaccgaaaccggcaaactacctgaaataacacaataaaaaagccggaaacagtcattgtttccggctgacggctgttttacggattgatacgggatattacctgttcaggtttactgagcatctgcgggttttccgctgacatcctgtttcagctcatcaatttttttatcagcggcggctttggcttcatccgctttctgtttcagctctgcggctttttcttccgcggcttttttggcatcttcgcctttatctttggcatcagccagcagggcatcagcctcttttttcagctcatccgctttggcatcggcactgtcacggatttcagcagctttctctttggcgtcagccatcaccgcacctgctttttctttggcatcaccggcggcttctgttgcattctgtttcagttcagcggctttctgctctgttttatccgctgcctctttggcatcctgctttatttcatccgctttctgctctgcggcttccttaatctgcgcggcaccttcctgtgctttctgtgcggcgggatccgttttgctgctgtcgtcacacccggtggccagtgcaaatacccccgcaaggatgagtgaacttaataatgcctttttcatgattaactcctcttcagcaatactgagtaaaataaccggataacatcgtgtccgcgattattgattatataataaaatcaggcagtctgctgacagatataattttctgtcagggttatccctttcagcatagaaaatgaagcgccggttgtatagtgctgagggggatttatcagtaacggcataaaataatatcccgctgcataaaaatatccggtaatatcaatacagaatgcagtcttataagcgcaacatagtaacatgttttatttcagttggttagcgttgtttgtcagtgtaaggaaataccatgacatattatctgctggttatcgttaaatttatcatcggctttgttattgtgttaacgcacatgaatatctccgggaaaacccaattatcacaaatgacaccggttgattttattggaaactttgtactgggcggcattatcggcggtgttatttacagtgatactattccgctgacgcaatatattattattctgctgatgggggtgagttttatcagcataatcaattgggtcagcaaacatatcagtgtgctgcgtgcggtgactatcggtaacccgatcccgattattaaaaacggggtgtttatcatggacagcattcatgagaagcgtaataaaatcgatattctgaatattacctcccgcatgcatgcgcaggggatctattcataccgcgatgtgtattatgcgcagatagagccggacggccagctgacggtgatttgtgaccagtcacagatgccgtctgtcattgtgatgaaagacggcgtaccgcgtaaatatgaactggaacagattggtcatgatgagccgtggctggcagaccgcctgaaacagcagggaattgacgaccctgagtctgttttcctggcggaattttataacggcagcctcaatgtggtgatgaaggacgggcggatgaccggtcatcacagcgagccgtcacagccgtaaggttttttcccttacggcacgataatgactttttccggatatttttcacggaattcgtgcgctttctgccatttatcgtcacagataattttatcgataacggcaatctccgcgatctttaaaatcccctgctggccgaatttgctggagtcggccagaataattttctgcttacttttttccagcattttccgcgcaatcatgccttcttcaacgcttttgaccagaataccttcatcgcgcacaccgcctgcaccaacaaacgcaaagtccgcataaatatgatcgatttcatgcagggttttcgcgccgagattggcccggaattcatggctgtattcaccgcccagcacatacactttcgccagcgggttctgcgaggcgattttatccgcgataagggcggagttggtgaaaacggtaaatgcaatcgccggtaactgcgcggaaaacagcagcgttgtcgaacaggaatcgatatacagtgtgtcgtgctcggaaatcagcccggcagcgtagcgcgcgagggtcattttttcctcgcggttcagttccagccgctgttcaaagctgccttcgctgacactctttttcttcatcgccccgccgtgaattttgatgatctcgccttctttctccagaatggagagatcacggcggatcgtctcagaggtgacactcagtgtatcagcaagatcctgcacactgacttccccctgctgattcagcagatcgagaatgtattcctttctttttatcggattcatgaccgttctcatcacactcgtaaacatgaacaatattagcgcattatgtgtcgttgcggaatgccgctctgtaatgatgaagtgcggcagcaacgccatcctcccggcagtcagccgtaatatacccggcggcctgcttcagtgccggtacggcattgcccattgccacacgcagatctgctgcggcaaataaagagagatcgttttcctgatccccgatggccatgatggtacccggccgcagaataccgcgctccgtcagtatttgcagggtactgcctttactcacggatgccggaaccagttcaaaatagtgctggtcggtaaagaatgcgctgacctttgccggtaacagcggacgaaggatttcagcccgttgccgcagggcttctgcttctccgcacagggtgattttaatgatatctgtccggctgaaaatatcgtctgccgcgagcgtttgtattggcaggccgaataattcagcttcatgaatggtgtattctgatatttcccccggcggacagagcagagcatcctcaccgaaagcatgccagccggtggtgagcaggttttgcagtgcggataacattaccggagacagggttgcccggctcagaacggattgtgtacggcagtcataaatcaccgcaccgttacaggcgccgatagcgcggatcaccggaagcagcccggcgctgtccgtcagagacaaaattgcccgcagcgggcgggcagagcagatcacaatatccgtttccggcggcagcgccagcagtgcccggcggttgccctctgaaatacggttatccggatgtaaaagcgtgccgtcgagatcgatagccagtgtggtcataaagagcctcagcgggagcggtgcccccgcattggaaattcagtcagttgtgatgaataaaggattgagtaacctgtgcagccgcctgacacaccacgttatcaattgcggtgccgaccactaaaatattcaccccggtttctttaaacgctttggcattggcgacgttaataccgccttccgccagcgtcgggacactgactgcgccgaccagcgctttcagccgagctttaatctgttccggaatttcaccggcagccacgccctcgtagctcataccggtcatcaggccgatcatatccacgccgatggcttccattttcttcgccacttccgcgacttcttccggggtttccgccgggataccaaaggtatgcagatcgtccgggtggccgatgtaggcatccacggtcaggccgaagcggtgcgcaagactgacaatatctgccagatcctcaaaagtggatttatgggtgtgcaggccgtcagctccggcacgggcgatctgtaaaatatcctcttctgtcaccggcaccgggatggtttcggtgaatccgccggcgatcccgaccgtaataaagacatcatccgggatcacattgcggataccgttgacggcttccgccatctgcgcggtggagatctcatggcggatctgttcggcagcgtgcatgttattcacgcccctgtgtccgcgtgccagcgccagcgccggatggttcggctccagcattttgaccccggcatcacacactgctttcgccagtcgcgcgtcatcaccggtgatacctgtgctgagcagagtctgcccgttgtgcagcgcaatagcatttctgactttcgccatggcctgttcacgttttttattcatatcacctataaacatatcaacctcttattactttttttgtgtttttgtatgacggcacccggaggtgccgtttttataaagccctggtgttggcgtgtgatatttttcacacttattctttgctgtgtcgtctttgcatcagcctgcggctttcacggttgtcacggcactgaaacggttggcgatgacagttatggcgcaggttaaaaccagaatcacggtcatggtcagcgccatgtaaagtgcgttactggataagaacggagaggcaaacgccgggacatacgccacccctttgacattaaacatgccgagcatcatgccgccgatcccggcggagagaatggcaccgccgaacacgattttgttggcaaacatgaagggatacgccgattccacaaaggtgccgaatcccagattgataagcagtcccggggcggcgaccgccgcctcactgcgttcacgcggggcaatgacgtttgccaggttaataccggcggcaaccatcaccagcccgaccatatccaccgcgccgaggaagctgacaccggttttttccatctcgagcagtaccagcggcaggatcaccgcgtgatacacaccaccgaggatcgcaggccagataaccagaccagccagcagtcccgccagaaccggactgaaggtgagggtgctttccagcgccagtttgatgtagttaccggccagcagcgccagcggactgaggaaatagaacatgataagaccggcggccagaccggaaatcccgcctgccacgatgttgacggtggtcatcggaaatttccagctgatgcacagggcaaacaggtaacggacaaaaatacccgccatgatcccgccggcgatcccgccgatcagaccaccctcgaccgagagcaccccggcgacaaccccggaaacaatcgaaacctcatccagttcggagacctgtttggcggcaatcaccgccacaatcaccggcagccctttgagcagcagctggaaaatcgcatccaggctttccagtcccgggatgtggctcagcgccagtacaatcgccatggcaataaagccgggcagcgcggggatcataatgccgcggatattcatccgcttaagcagactcttatcggatggcccgccggtgctgcctgcactgcccagaaccggacggaatttaataccccagtgtttacacagggaggagataaacgagatagcccgggttctgctggtggtgccggtggtacccgaggtggcaatcacattggcaccggcggcggcgatatgggccatcgaggtgccgccggtaccggcgatcggcactttcttttccgctgcggcctgaagtgccaggcggttggcgttgtgcggatcgccgctcataataatgatgccgtcgatatcgccctgttctatcagccgggcaatctgttcatcactgccgcgcacggcgtcattgacttctgcgagggtgccggagaacgtcaccgctggcacggcatctgcttctgtcagggtgtagaccgcggcagcggtagagggtttggcaacatccatcgacgcctgtgctgcaataaactgcacggcagcaacagaaacaccggcggactgacattgtgtgtagatttcgctcagaagtttttcaggatctgcaccaccgaggttgtacaggttcccgccactactgcccagtatgacaatttttttcataatcggacctcagggggttcagggtaagtaacaacttattgttgttttttgttgatattgcttggtataacaacgtaaatcaacacatcaaaatagggcgtattgtttatgaaataatcactgaattgattcggtttgggtaaaatagtgtagaagtgtgatttttgtagtgtgattagctggtaatatcgggattttattttatttaatgctgtttaattattagctaattattttgctttatgttgttttgtgtgagtttgatcataattaaccgtgtcaatcacacagagaaaccacataaaacaaaaaagccactctggggagtggcttcagaataaagataaaaaacggatcagcccggcagattaaccagtgagtcgcgggtgatatcgcggatggtttttgcaccggtcagtgtcattgccacgcgcatctctttattaatcagatccagcaggttttcgactcccgcctgtccttgcgccgcgagggcatagacaaaagcacggccgagcaggacagaatctgcccccagcgccagcatccgcaccacatccagcccgttgcggatcccggaatcactgagaatagtgatgtctgatttcaccgcgtcggcaatagcaggcagagcacgggcggtggagagcacgccgtccagctggcggccgccatggttggagaccacaataccgtccgcaccgaaacgcactgcatctttcgcatcttccggatccaggatccctttgataatcatcggaccttcccagaactcgcggatccattcgaggtctttccaggaaatggatggatcgaagtttgcccccagccagccgatataatcttccagtttggtcggtgcaccgcgatagactgagatattacccagatcatgcggtttgcccagcacgccgacatccagtgcccagcgcgggtgaaccatcgcctgtaacacacggcgcatggcggcattcgggccgctcatcccggaatgggcatcacggtaacgcgctcccggcaccggcatatcgacagtaaagaccagggttttgaccccggcggctttggcgcgctcaagggcatttttcataaaaccgcgatcgcgcagcacatagagctggaaccacatcgggcgttcaatcgccggggcgacttcctcaatcggacacacggataccgtggacagagtaaacggaacgcccttattggctgccgcttttgccgcctgcacttcaccgcgccgcgcgtacataccggtcagcccgaccggcgccagggcaaccggcatcgccagtttttccccgaacagttcagtttccagactgagagacgacatatcgcgcagcacccgctgacgcagggcgatatccgccagatccgccgtattgcgcttcagggtatgctcggcatacgccccgccgtcaatataatgaaacaggaagggtggcagtctggattcggcagccgcccggtagtctgttgaagcggaaataatcatcttaagtacctgtatatgtatgtaacaaactcagcactgtgcccggttacagggtcagtatcagtgccatcacggcggcaatcacgccgtagataaacatcggaaccactgtctttttgataatggatccttcggcgttggtaatgccgaggatggtgcagacagcgataatattattcagacacaccatgttccccatggcaccgccgacagactggagcgcgagggttaaattgacattcaggccggtggtctgggcaatggattgctggatcccgccgaaggtcaggttggacacggtattggagccggagaagaacgagccgagtgcgccgagataagaggcgaaatagatccagctctcaccggtggctcccgccagtgagcggccgataatgtaaaccggcgcattttcgccgccctgcatcatcaggtttaccataatcagtgcaccgaacagggcaataaacggcttgttggtctgctgtgcggtctgcacaaacatggtttttacctgagtccgtttcaggcggaacaggaaaataccgataaacaccacgaggaagaacgggatcagcgccgggacatacagcgttttataatctgccgccgccggggtgccgaatacgttgctcaggcggacaatcagtgcatcactcagtgtgatatggccgaggaaacccagagtaccttcccaaatcacgttagtgctgttgagcagtcctttcaggccgagctggtggatacgggtgacaatcagaatgccgatcagcagcagggtcggggtcatcgctttgataacctgcccgaacgggatcacttttttctctgttttttgttcagtacgggtcaggccgataccggcacgggcggtcacgacagaaatcccgaggccgattgctccgccgagcagtgccgggaactcatagttgacctgggccagcagcagatacggcacggtacaggcgagcacgctgatcagaataaacacgatattacggcggatctcctgccagctgacaataaaacgcagcgccagcagcgggatcacaaatgcagccacaaagtggatcagcgcggagtagtggcttatctgataaacactctcctcactcagcccgaggttggcaaaaccaaaccaggtcggtgtaccgacggcgccgaacgaaaccggcacggagttcatcaccagcgtcagcagggcaacccgcatggccgggaaaccgagaccgaccaggatcggtgcggcgatagcggcaggcgttccgaacccgcttgcgccctcaatggtaaaggcgaatgcccagccgataatcatcagctgtgccaccggattggggctgatattttccagccagctgcgcaccacgttttccgcgccgctcacctgcatcagcttattgagcataatcgccccggcaatgatggtgatcggtgtcagcacagaaataaaggcggtgacaatattggcgctcagcagtgtgagatccgttttaaaccagaacagctggatacagaacaccacagcggccgtgaaaggtaatgcaatgtaggaagggatactgcggcgttttgtcatcatccagattaacatcacgatcggtgcaagactgaaaaaaatagccataaagccctctgacattattattgttttaaaaataaatgttgtatgcaggattcgttaaattttcattacggaattattttaatcacaaccaaaaagaattatctatgctgcatttttttaacaattgaatgcggacgggaaatgacgaaaaacgcagaaaatcaggtgaaaaaaggaaataaaaaaatgttatttatcagtaaattaatgggttaatttgtatgataaaaggacagggtcacattaattaggccacaatggtcaatagagaaattccaaaaatcgactaatcaatatcacagatagataacaatcctgaatctgtcagccgaaataaggactgattgcctgatatgacgcctgaatatgatcgatcagcaggcggattttgaccggcagatggcgggtgtacggatatacggcatacacgccgagttttttgccgctgtaacccggcagaacttccgtcagcaacccggcctccagatcctcatgcaccatacagcgcggcaccatggcgataccgtggccgctgagcagtgctttgcggatggcgcgggcattattgaaagcgatattaccgcttacctgcaattcatagatttcaccggtatccgggcggcgcatcagccagtttgaggtaccgctttgctgataggtgtaggtgaggcagttgtgtgtcagtaaatcttccggattctgcggcgcggggtgtttttccagatagcggggggaggcgaggatcacccagtgagaatcaatcagcggacgggctatcaggctggagtcactcatcatcccggtacggatagccagatcaatccgttcattcaccaggtcaacaaaccggttctccagatgcatttccactttcacattggggtatttttcacagaattccgccacgctgtcgctgagaacaagttctccggagatagtgggtactgacatacgtataagaccggtcagttcatcactgttggcactgactgcctgcaaggcactgtgaacctggccggtaagggatttggcatgctgatacagcacgcggccgttttccgtgacagagaggctgcgggtggtgcggtagagaagacgggcgccgagggctttttccagccgtcctacccgtttgctgagcacagagccggtgacaccggccatttccgccgctttactgaaggagccgcaatccacaatcagcgcaaataaaatcagatcattggcgtactcgtgggcgggcagcatggtaaaacctccggcagtgaatgaaacaataaacagcattcactatatcaaaatctgtgtaacagtgataatcacgccggagacagacaggttaaagcgggtacaccatgtggtcaaaggcaaacactgtggccgggaaaatcgcctgacacccgcgaagtaaacgctcacaatcttcttcgctgtagcgcccgctgaaatgggtggcgatcagcgtaccaaccccggcatcacgcgccagagtggcggtctgcacggtggaggagtgtccgcggctgttggctttttctgtcatagtgccgtcaagtgtggcttccagcacaatcacatctgcattctgtgccagtttcagcgcattttcacacggcgcggtatctccgaaaatcaccagatgacgtccgcgctgcggttcgccgagataatccgccccgcaaatcacccggccatcatccagtgtcacttcgccgccctgtttcagggtctgcatccacgggccgccgggcacgccttcggctttcagacgctgtgcatccagtgcgccgggcttgtcatgctcttcaatccggtagccgtagctgatcaccgggtgcttgagtgagtaagcgctgactttcagttgtccgtcatcgtaaatcaccccttcctcatctatctcaatgatctccagcgggaaagtcagatacgagccgctgagtgtcagtgcagtttcaacaaactgcgccagtccctgcgggccaaagagagtaagtggttcctcacatccgcccatggagcggctgcataacaggccgggcaggccgaaaatatggtcgccgtgcaggtgggtgataaagattttttccagtttcgggattttgaccggacttttcaggatctgatgctgagtgccttcgccgcagtcaaacatccacaggccgcgctgtaatgatttgagatccagcaccaggctgctgacgttgcggttgttcgacggaacaccggcaccggtgcccagaaaaattaactccatgttgttccctgtattgcagttgccgccgcgcggaggccggtattacggaatacggcgcagttgcggcgagcgggtaatattttccggtaagattaacggttcttccgccagcggtaaactcagacgggttttgccggtgatgatcgtgaccccggccgactgccaggtatctgctgccagttgtgtgcagtacagcccgtcctgcgggttgatgctgaaaggcgtgccgagctgcgcaagggcattatctcgggcgcggcggtgattttcactgtctgcctgtacggcataccaggcaacctgtccgtctttggcgtgttcaataaagaaatcaaggggatcgcggttcacgccgctgataccgtccgggtgctcctgcggggtggcgtggataacataagtcccttccggtgtgatatcaacaataccgacatggctgaaaccgctgttatcgatacttctgacaatatcactgatggcttcgccgccgtcacggaaaaccaggtcaccgctctgaatgccgggcggcggtactgctgcctgcagcggcagtgcggctgtcagcagcgccgggagcagaaacccggcgcagagtgtatgtctcatcagcgcaggatgattttccagtcgccttcatcttttgtcagcatgaaacgctcatctttctgtttgccgtctttgaaattgactgtcaggatgacggttgcgcgttttttgctttcatcaatatcgacggatttcacttctgtgctttccacgccgccgttgccttcaatgcggcgcgccatatcaccgacaatcatctgtactttgcctttgatttccatctcatttttctgtttatctttttccgggatggcgagcagatcataagctttatccgcatcttttttctcaacagcactgtagaactgtttaacaacatcctgcggggaatcactgccgcaggcggtcagcatcatactgccggccagcagcatcagggtgagggcgatttttttaaacatagtttttcctttaaaagacaacaggtgtttttattattttctgatgaaaataccggcagtatacggacatccggcggcttggcaatcctgtatataacgctgacggcggattcagggaaagatagcgcagtgagggcgacactgcgcaggttattatgcggatacctgttcaggaaaaccccggcagaggattatcagggcgtatcactgagcaggctctccagcaccatcgcgccggctccctgagaaaccacttcataggaatcaaacgcaggcactatccgggtgttaatctgcaggaatccggccagtttttgcgccacggttttctgcacagtggcgaagaaagtgtgtttcggggtcagcgtcccgccgcagaccaccacatccggctggaaggagagaatggtattggcgattgccagaccgtaataataagcagcctcttcgagtgcatcggtacagattggatcagccagctcaagggctttaaaaatcacatggtaatcaatctcctgctcatcactgaccagcgaggtgatgacggagggtttgccgcgccgcagatgctgaatcacggttttgcggatagcttccagcgaactgtactgattaagacaaccaaacgagccgcattcacaggtgcggccgtggagatcgagcgtcatatgcccgaacgcattttccgagcccggcggcataaagcggacaggctcgctgagaatggtactgctgcggatctccgcgtcacaggtggtgaaaaacaggcggcggctctctttgtggcgcagccggtattctgccagtgcggcaaaattcaccccgctgccgatagtcacctgacatccggtacggctttccgccatctcacgcagtaacgggatcagataatcattcatggcgcggcggtcactgccgggaggcagggtgtaatccgccgcaatgccgataccgagcagatcatccgtactgaggtgattttcctccagcagtgataacagccgggtgagcagacgctccagcagcacctgcggcgtttcctgtccggcagctttgattttgcaggtcgccagcacatccagcttcaggttttgcagcacaatcgtggaatagatattgctgatttcaatcccggcgagccgccctctgtccggattgacactgtagagaatcggtttgcgcccgccggtggattgccccagttctgccgcgctgataaggcccagcctgctcagctcatccagcagccgcgcacaggtggcgccattcatgttggctttttctgacagcgtttccgctcggataggcccgtcattcagaatcagctgccagagggttttcagtttccgggttttggagtttttggatgaccggaattcactgagtatgccggataacgtcataagcccgaatctccttttatcacggggcactgtctgttattcatcattgtatccggatcctttttctcatattgagaagaagatcctgtttccgtgtttacatctgatctacaatcgcggcatacatttcatcaattgttacatcccggataaattcaggagataaataatgcatctcaccgctgatatcgcagaaagcaaagcgttcgtcgaagcgcagatcactgttaaaccgactatcggtatcattttaggctccggcctgggaccgtttgccgataccctggagaatgctgtccgcattccgtacaacgatattccgcatttcgccagctcttccgctgtcggccatgccaatgagctggttatcggcacgctgggcggcaaaaccgtggtggcgatgaaaggccgtttccactattacgaaggcgtgtcgctggatcaggttaccttcccggtgcgtctgatgaaagcgctgggtatcgaaaagctgatcatcaccaatgcctgtggtgcagtaaataccggttttgccccgggcgacctgatgctgatcacggaccacctcaatctgacggcaaataatccgctgatcgggccgaataatccggatctcggtgtgcgctttctggatgtcagtgaagtgtacagcaaaaatctgcgcggtatcgccaaagcggtagccgcagagcagggtgtgaccatgcgcgaaggtgtctacgcctggtggaccggtccggtttatgaaacaccggcggaaatccggatgatccgcacactgggcgcggatgcggtggggatgtccaccgttccggaagcactggtggcgcgccacgccgggattgaaaccctggggatttcctgcctgacgaatatggcgtgcggtattctcgaccagccgctgagccacgacgaagtgattgaaaccgctgagcgggtgaaaagcactttcctgaagctggttaccggtattatttcccgtttttaatcagataatcatcagctaagtgtggttttctttttctcagtataacattaagaaaaccgtcgttcagaggccgccctgacatcatgggacgtcggcggcctttttttctttatctcagcggagatacccatggatataaaagtcagactgaaagcgatgctgttcctccagtatttcatctggggcgcgtggttaatcaccctcggctcgtatatgatggcaaccctcaaatttactggggctgatgtgggctggatctacagcaccaaagggctggcggcggtgattatgccgggcctggtcgggattattgccgataaattcattccggcgaaccggctttacggcctgtgtcacctgatctgcgccggtgcactcttttatgccgcaactgtcaccgatgtgaatgtactattctgggtgatgctgctgaatgcgatggcctttatgccgaccattgccctgtcaaactccgtcagttacgcaagcctgcaaaaatataacctcgatccggttacgcatttcccgtctgtccgggtgttcggtactgtcggttttatcgcggcgatgtgggcggtcagtctgatgaaattcgagctgagcaatatgcagctttatattgccgccggcgcatcattgctgctcgcactgtattcactgacactgccggcaattccggtggtaaaacagaccggtacgaccacctgggcacagcgttacggcctggatgcctttgtgctgtttaaacagccggtcatggcggtgtttttcctgtttgccatgctgctcggcgcagtgctgcaaatcaccaatacattcggtaacccgtttctgcatgatttcggccgtatcgcggaatataaagacacgctggtggtgcagtatccgtctgtgctgctttctgtctcacagatggctgaagtggtgtttatcctcgcgatcccgtatttccttaaacgctacggcatcaaaaccgtgatgctgatcagtatgattgcctggacactgcgttttggtctgtttgcctttggtgagccggtatcaatcggtttcttcttcctcgtgctgtcgatgattgtttatggctgtgcatttgatttcttcaatgtctccggctcgattttcattgaaaaaaccgtcagttccaaaatccgcgccagtgcgcagggactgttcatgatgatggttaacggtgtgggagcctatgccggtgcgattgtcagcggtaaggttgtggatatgttcacggtggacggcgtgaaagactggcagtcaatctggctgatattcgcctcttatactgtggtgctggcgattattttccagttcactttccgctatgaccataggactgaaaaagccgcagaaaaagcggtggtataagccggttattaccgaaacctgtaaaaaactaaaaaatgccctgttttcggggcatttttttattatccggttgttgcgataatgttaattattgacctcacttatttttaataccaggtcagtaattggctgattacattgttctctgaagtaaactcttctgttaatagtcatgcgataaggtaaagaaagtgaaataaaactgcagttttttcttttcatatcaggaataaatttattattcccggcgataaggctataacccgcagcggaagaaataaattccggaatatcatatgcatctgatatcctggtgatattgcaatgaccatttttgttaaagaagatttttaaaaatgtattgaatatttcactttcaacttcattttctttctgaatgagacgttcatgtttaattaattcctgaattgaaccatatttagataacaggtcattatgaacaagtaatcctgcctcttcctgagggagctttatatatctgatgtttttattatccggaattatagctgatgaaataactatatctgtattgtttgacagtatttctttttcaatatcaatttgttcctctgacgtcagagatagatcaatattatgtctttctttacaaaatttaagtatttttcctctgattaacgaacaataaagtccgttaattttgacattaacggatattctgttaccttttctttctgacaatttatcttctatatttttcatctgaagataataaggtaaaagatcattgtaaagatgcgtacctgcggttgtcagtgataccttttggccggagcgtttaattaatgaaatgccggttttagattcaagttcacgaatgccatggctgagtgctgaaggtgtcagattaagttgttcagccgcgttcgtcaggctgatattttcagcgatagcaataaattgtttgagctgccttgaaataaacataattttaacctatgcaggaatgtcattaacaaaggtatagtcgttatcattttcaataaaacagataattacatattgtatcaccaggtacattactttttttgcaaaaaaaagtaataaagtaaaaatgtgtttagtgtaaatagtttatccatttattcattttttaaatgtatttcagtgatggatttatctgcgaaataataatttatataaatcaaaatccaatgtattaaatatttgggttggtatctgcatgagtccctgattatcactgatgagttaaataaaattcagtaaggtgagaaaaaaaatatgttgtatctctggggagggtattgtaactgataaaggatggtgaatagttcctggtcttgcaggatgacatgtaggtattatcggctcagtttaaggatataaggataaaaaattatgcagcccgtatcgggcatactaaaagaaataagcaataacagtgataatacagatcaggtctcatatgatttaatgccactatcctgcgcagagacttgtgataaatatcatagtgttatttcttcctctgagtctgaagcgcttttactgcatgtacaggaacaaaagaaaaaaaataagtttactgattgcgtttaatgaaccatctccggcccgtatacgcgccgctgtaaggaaaccgaaaatgaataatacagagcaggtgagaatcgaaacgccatcattgccgaaaggaggtggtgcgattaccggaatgaccggcgagccgggaatcatcggaccggatggtgcttccgccttttccgttccgctgccggtcagccgcgggcggggttatttccccgaaccggtactgagctacaacagccgcaacggtaatgatgccttcgggcttggctggacggtcagtatggcagcgctcagccgcagagtggtaaaaggtgttccccgctacacgaatgaagatgaatttaccgatcctgataatgaagttattgttcctgttttggggagtgacggcaagccggtatcatccccgaaaaggaaactgcttgatacagacctgaaaacggaataccgggtaacacaatatcgcccccggctggaaacctcatctgacctgctgcaatactggcaggcggaaagagatgttccggggtgcccgtctgagttttgggtcatatttgcggcagacgggcaggtacacctgttcggatatgaggattcggcccgcatatatcaaccggataatccgcgacacattgcccgctggttaattaatgcgtcggtatcccctgagggggagcagatttattatcgttacagtaatgaggataatgaagggtgttctgaagatgaaatccgttttcacccgaaacaatcataccgttaccctgaaaaaatctgttacggcaataaaaagagcgggcgccattttccttgtgtgaataatagcgctgatgataacaagtggctgtttttcctggtgtttgattatggtcagcgcagctgtacgctggctgatattcccggatggcagattccggcagggaagcagtggccgctgcgtcaggatatcttttcctcttatgaatacggatttgaaattcgtatccggcgtctgtgccgtcaggttctgctttttcaccgcactgctgatttgaaggccggtaccgatcaggggagtgacccggagctggtatcgcggcttgttctgacctatgacgagtccccggtcatcacaacactggttgccgtacgtcgctccggttttaatgacccggcggataaaaacgggataaccgtattaccaccgcttgaatttaactggacgaagccggaaaaatggtcagaacatcaatgggaaacattggatcatatcgggaaactcaattctcatcagccttatcagttcctggatttatggggcgagggaagcaaaggtatattgtataaaaatcgcggggcgtggtggtatcgctctcccgtaagaaataaaaacagcagtgatataaatgccaccacctggagtgaaccgcaacttttgccggatattcctgcattggataaacatacactgctgattgacctggatggtgatggtcgcctggaatgggtcgttattcaccagagggcaaacggttattatccgcaggataaaaataatgcggaacaatggctgcgtttctcatctctcagcggtttaccgacagaattccattatccggcagcacagttaattgattttacaggtaaaggattgtatgacttagtggttatcggcccgaaaagtgtccggctgtatccgtcagatcgtaaaggctggaaggccggtacaatcattaagcagcctgatggtgtaacactgccggttttgtcgggggatgaacgttcttttaccggattcagtgatttaccggggaccggtcagcagcacctggtccggattaatatggatggtgtttattattggccgaataaaggtaatggctattttggccatcctgttcatattccgggtttcattccgggagagcattttgaccctgcaaacctttatctggcggatattgatggtaacggttcggcaaatattatctatgcgcattctgattacctcgatatttatattaatcagagcgggaatcgtttttcaaagccggttaaattaccgttacccgaaggcgtccgctatgatcatacctgtgaactgcaatttgctgatattcagggaaatggcgtggattgtatgatcctgatcaggccattgccggagttgcgccattggttgtttgagttctcaactaaaaaaccgtggctcctcagtgaggtaaataacaacatgggtatgaattacgcgctgaattaccggagttcggcgcagttctggctggatgaaaaagcagcatcagaacatcagaaaacgcctgtctgttatcttcctttcccggttcattgtgtatggaaaacggaaactaaagatgaaattaccggtaatacgctgaccagtacggtgaattaccgtcatggtgcatgggatggttctgagcgggagttcaggggttttggttatgttgaaataacggattctttgctgacggaaaatgaagaaggtaaaccggaaacaacggtgccaaaacaaacccgcagttggtttgcgacaggtattgaatcactggataaacggtttcccggggaatactggaatgaggacaaggctgcatttcccggctttgcgcccagatttacacaaaattacggtgataaggaaaccgaatgtaaggatgattgtaaaggcgccgcgaattattggctgcgtcgcggattaaaggggcagctactcaggcaggaagtttacggtattgataaatcaaaattatcagcagtgccttatgaggttactgaacagcggattgctgttcgtctggctgaaaaacggggctgttatccggtggttcgtccgtctgttattgaacatcgccactatctgtatgaacagtttgctattgatcctaaatgcacacagacggtgatcctcagtagtgatcaatatggtttgccactgaaacagatcactatcagttatccgcgacggaaacgggatattaatccctatcagagtattgagagcctgctggaaagtacatgggtgagcggttatgatttacagcaggagaaactgcgttttgtattacagaaaaacagttattacgttcttgataaccatgggaatggtatccggcagctggcgatagcggatgcacaacggcaggatacggctgaatttgaccgcaatgaattgccacaggatggttattcactggagagtttattacagaaggatagcctgagtaataaaccgaaacagttcgaattttccgggcaaactcgcgtggcgtatctgaataagtccggaaaaagcggactattatcgcctgactttcctgtacgggtagcttacatggaacacgctgaatttgatgtaaatcatcttaaagaaatgaaagattatttcccggagggaagtgtagagaagttattatcatccggaggatacattgaaacgaagtatgcatttccggaaaaagataagaaagaagaaatcatctatgcagcacaacgggacataacgaaatacggaactcaggaacaattttataaaccgatgtcttaccgtgctacaaacctgacagaattcaataaacttaagtgggataaatatttttgcgtggttgttaaatatacggattcagccgggggaataactaaacctgaatataattttaaatatttgtctcccgttaaaataacggatattaataataatgtatcttctttaacgtataacgggacagggcaggttgccagtgtccggttttccggtacagaacaggggaaaaaaactggatattctgatactgcattaacaatccctgatagtattgcagatgcacttagcctgactacccgtttaccggtatctgagttgtttctgtatgaaccaaacagctggatgctaaaagtttcccccgaatttatggcgccggagtatagtgatattatctcaaagctgcaaaatgataatatcattacagaagatggttatgtcagtgcattttcccgttatcgtattaatgaagataaccgctgcttaataaaagccgtgattataccgggtgaaaaaaggttgccgccacatgtattacagttaaaaactgatcgttatgataatgacaacgctcagcaaatacggcagaaagtgactttttttgatggcctttcccgtcagttgcaaacatctgtcagagttgaatccgataatacggttatacgaaatggaaaaggcagtcactctccgaaaaaacataattctgatttccgctggtcggtaaccggccgtaaagaatataataataaaggttttattattcgtgagtatcagccttattttattaatgactggaagtatgatgttgactttatttcaggaaatgagcggtggtcagatactaattattatgatccgctggggcgccttatcaaagttgtgacagcaaaaggttatttacgtaacaccatatatacaccctggtttattgcacaggaagatgaaaatgacacggtatgatcgttgttaaaatattctcagtaataatataatattattgcatgttgttttattggctcttggtttaactaaatatcatgcagggtttaattattgtctgaaatattacaataagtgacttttccagataaagattatttatttccatggtgttaattataaagcactgcatggtttactgtatttcattattaaaatctgccttattaaggaggagttttgatggaaagtgataaacataatttacttttttcacggatagttgagcaggcacttccgggattttcagataaattatcagcaagaaaaaatgaaaaatcggttattacccgtctgaagcagggaaaaaaagggctgatggctgactatcccggactcggatatccggatgctgaaatattgcataatcgtctggcagttgcagttcatactgtggcccgtaaacaacgggaattacgtcagatcagtgagtttcgttcaccgcgcgaagaaaaaggactgaaagcattaacccggcaattaacttatgaagatcaattctcgccaaactgggcgggaaatactttaccggatgcgatagattcaggccacggcgctgttgcttatctttatgacctgcttacatttgtggaaagaatgattgaaccgaagggagacagtgataaagcgattacactcaaacagcgcagaccggatatttataatattttactgaatgaagagaatgtaaacggaagtatttccaaaattcagattattaatcaaatcatgagtactgcaataagtcagcaggaaaatagtgaagatcctgagaaactgatgctgaatgcacgctatccttaccagtttccgtttgaaaactatatgaatcagatttatgccgtactggatgaatatgacctatctataggtgatattaaacggcattgcgatcccgaggcgccttatttcacacagccggttttgcacggaaagcgttcagattctgctctctggctggatagtcgtttagggcctggtctgcgtaatattttgctggccggaccacaaatacaaaatagcaagaaagaagataatgagaaatattttaagagaaattttggtgttgaacagtttacggatttactgaataccacggttttctgtcagcaattaaaacttgagcgtgtagatctggaatcattgttttcctgtggtgaatatacaccacatttatccccgaatgttataccggaaataagtaacagatatgcggataaggagccggggcgtgaggtatctccggctgtttacggttcggtatttattaataatggtgtaatgcctgctattagtgttaatgaaaaaatacacagtttcaatgaactgaatgaaggaagatgcgaacgcattgaacgttttctgcgtctgtcgagggcacttaatcttccttatgaaaaacttgataccttattgatatctattttaaaagctgaaaataaccagagcggtcacaaatgggatattactacaaataccctgagagctattggcttgttcacgcaaatgaacagaaaactaaaatgtacagccagtcagttttctgttttatatgatggtatttcggtttacagccggggaaaagatatcagtgattttgaccggttatttaataatgatgaccgctttaattaccgttttattcttgatgacaaaaaaatggaagaacgggatattaaccgtatctgtagtgtttttggtattaactacgatactttttcttatctggcactcctgacccgtgaagttatgggactgaatgtattaacccgcagccgggatgttatttctgcaatttatcgtcctgtggttttggctgacctgctgaaaataaaacccctggaattactcgcattaatgaaatcaatgaatcctgatgctcagtttggccgtttatttacagggataccggaaaaccaggtgtacggatcattcggacaggcggatattaccagtgcaatcagtgcactaatcagtcttcagacatggcggaaagagaataaactgtctgtagcacagatctttaattggatcacacctgcgattgtcgatgaccaggaagataaaactgagcgggaactgttccgccagattaaagaaaatacagacagtgcactattcagtaatgaagtcttgtatcttgctggtgtaccgaaggatataaactgggtttcggcattacaggaactggtcgatgaccagggaattctgaaggatgctgatgatggtctcgactgggacagttataaaaaaaatgcattaaaaataattacttccaagtcggaagaaaaattaaaaaatttaacatcggaagaaagaaatactatagttaatacgattctgtccgtccttttggaaaaaagagcagcacagtggaagagtgtgagtggattactggaaggatatattggaaataaaactgacagtattacaccggcattgtactggtgtggtagtaatacaggtgagtttctgaaaaatatcagagcactgcctgataataatatgttgtccgctaaagataataacgtcatggtgttattgtcatctctgcggcgttatagtgatattattgcacacttccgtcttgagccagctatgatgtcacagttattatctcatgataataatcacaactggtacaaactgaaaacagaaaaacctgatttacagttgctttaccggctttcagtatatcggaagcttattgatgatgctaaacaaccggctgataaattattaaactatctttctcttattaattcactcccgatagatagccgcagtgatgaaatacgcctgtatcgtgatcaggcactgaataaattatctctttttatgggatggagtattaatgagttattaactgcagcacagtatgtcgcgccggaaaatgccatcatccggacattgccgcaaattcttctcgttaaacaaatccattccgtctgcctgaaaacggggttgagcgcccgcagtgttatttcgctgtttaatctggatgaaagcagtgaatcatcactgtatcaatctgttgccggccaggtaatggaaagtctggcacagcaggatgtatcactttacagcaacgatgaatccagtcagggagacctgaccgcaagtgtttcagccgggaagacaacactgctggtttacagtgaaaatcagcaggaagaagaggaagagaatggggaagataagacattgctgacagttaccttacagacactggaaagtacaccgttggagggagtacccgttgtatggaaaaatatatccggactgggtgaattaactgatactgaaagtaaaaccgatacatcaggccgggcatcggtgacattaaaagcggggaaaaagcagggagttgcattaattaaagcatattatggtgtgaagaatatttcgctgcctcttatccggattgattgcgacagcagttcgttgggtgctaccgatattcagaccgtaccggaaaaaccggtagatattccggcagacgggatatcagctgttgaaataacagtacttttcagagaccaatacgataacccgggtatggataaaaatattcgctgggaaacaaccggaggccgttttatccataaggagaacattacggatattgatgggggctgtcacgcgacactggtcagtgataatcctgcagatattgcggtgaatgtgttctatgaaaataatcctgaatactcgatgagagttaatatctcttttatttaaaaatagccggttcggatgagtttttctggtgtgtataacgaacaggaataacgggagaataaaatgcctcgtaatgtaaaacagattttgaatcatctcgcagagaagaaacgggatgcatatgttgattactttactaattatgtagtgggtaaagatgaaaatacagcaatgctgggaattaccgatgcggatgatctgtatgattactttttaacggatgtaaaaacaagtgctgattttgaaaccagctatgtttcggatgcactggccagtattcagcaatatattagtaacattcttaatcaaaaagaaccgggttactcaggtgagtttagtgaggaacttcagcagtggtggtcaggttatctcgggcatatttcactgtggaaagcgtatcagaaaatggaggattatccggaagattataacttaccggatcatgttactgaaaaaacaaatctgtacactgactttgcatcagaccttggcagtgacagtcttaatgatgccgctatacaaacggctttccttaaatatctgcggggttatgaagcagttaatgcgatcagtgtcatttccggatatgttgattatccgggagagcgaaatgatcaggatacattcaaagggcatggttttctgaattctgactattttttcatcggtaaaaataattcatcaccagccggattttactggcgtgaagcaaatataagagcagataaatccaccgaatatatttctccccgggcgtggcaggagtggcaacctctggtcatcactgaagatgcaaaagatattttacaaatgcggattgtcaaagtgagtggttgccttttcattgtgtatctggcctgtaaggaagaaataattgcggatgaagcaaaaccagagaaaggaagcagggttaaaaataagaaacaatataaggtcacacttaagttaagccgtatggggctggacgggaagtgggatattcctgagcagttatatgaaaaaatctatgatagtaagcctgtgaaaaaaccggaagataatgcggatccgttccggttaatatccgttgtattcactcaggatgaacagcgggatgattatctggttattgcatggctggataatcagaaaaatattattttttccaatgttttaaatgtactgagacaacagttagctatcgacagcaagggtattctcggcaatggatggcaggcgaaattagcatcacgattttttaccggaaaaaatatctgtcagcaccgtatctttggtattgaaaaggatataagcagtatccggagaatagacagtgatccgaatttatcgctggaggcattctatagtctcaaaggtaactatcatcagttacgggtcagggggacttgccatcgttcagctaaaatacctgatcttatttcacttaactttcaggcaacggtcagtcagtggagtaatggccgcattattgtcagcggaaatcgggacaatattactgtcagagcagaggcaactaaggaaggtgcgatttaatcgtcatatgtgagaacataaagctttctttatcatgagctgtttacaatgcctgccatttccagctattcctcccgtaaatcccgttttcttgaccgtatgaatgttctggtgccgtggcaggatattgctgataagctgcttcacgtctatccgtcatcccgtcgcggccgacggcctttccccctggtgcttatgctccgtatccactgcctgcaactctggtttgacctcagtgacggagcggctgaagacgccctgcatgatgtcctgccgttccgtcaatttgcggggatctgtgacacggtgccagatcgcacaaccatcatgaatttccgccattttctggagaaacatcatgcaggagaacagatactggcactgattaaccagaaactgaagcaggccggactgatgttacgtcagggcatcattatcgatgcgaccattatttccgctccctgttccgtaaaaaataaagccggtcaacgggatcctgaaatgcatcagacccgcaagggaaatcagtggtactttggtatgaaagctcatattgctgttgatgcggccacaggcttgacggaaaaagtagtgaccacggcggcaaatgtgcatgacctgaatgcggcggatagcctgattacggagccggtagcaattgtcttcgccgatgccggatatcgcggggcagaaaaacgggactctctgacacatcgggttaaagagtggtttattgccaaaggtcctcatgccgtaaaaaagctcagacagcatccccggctgaataagcaggcgctgcatgatgaatatgtgaaagcaggtattagggcaaaggttgagcatcctttccggatactgaagtgccagtttggtttcagcaaaacacgattacggggactgatgaagaaccacaaccggctttcaatgctgtttgcaatgtgcaatttggtgcgggcgggacaactggcggggatgtcgtgaaaatcattgtaatatcagtggagcagtgacattttgcttaccctgagttgatgggggagattaaatattgtccaaactggggtgcttactttgnattaaggaaggtgcgatttaatcgtcatatgtgagaacataaagctttctttatcatgagctgtttacaatgcctgccatttccagctattcctcccgtaaatcccgttttcttgaccgtatgaatgttctggtgccgtggcaggatattgctgataagctgcttcacgtctatccgtcatcccgtcgcggccgacggcctttccccctggtgcttatgctccgtatccactgcctgcaactctggtttgacctcagtgacggagcggctgaagacgccctgcatgatgtcctgccgttccgtcaatttgcggggatctgtgacacggtgccagatcgcacaaccatcatgaatttccgccattttctggagaaacatcatgcaggagaacagatactggcactgattaaccagaaactgaagcaggccggactgatgttacgtcagggcatcattatcgatgcgaccattatttccgctccctgttccgtaaaaaataaagccggtcaacgggatcctgaaatgcatcagacccgcaagggaaatcagtggtactttggtatgaaagctcatattgctgttgatgcggccacaggcttgacggaaaaagtagtgaccacggcggcaaatgtgcatgacctgaatgcggcggatagcctgattacggagccggtagcaattgtcttcgccgatgccggatatcgcggggcagaaaaacgggactctctgacacatcgggttaaagagtggtttattgccaaaggtcctcatgccgtaaaaaagctcagacagcatccccggctgaataagcaggcgctgcatgatgaatatgtgaaagcaggtattagggcaaaggttgagcatcctttccggatactgaagtgccagtttggtttcagcaaaacacgattacggggactgatgaagaaccacaaccggctttcaatgctgtttgcaatgtgcaatttggtgcgggcgggacaactggcggggatgtcgtgaaaatcattgtaatatcagtggagcagtgacattttgcttaccctgagttgatgggggagattaaatattgtccaaactggggtgcttactttgccgcgtaaggaggatatccaggctctggatcgtcatgactgattaaatcgcaccttccctaaaggagcagaatatttagcattattactgtccggtgaaaaattgattgagttcaataagggagactttaaggaacacaatggctggttttcagcagaaaaaatattctcactttctcaggaacaatgtgacctgatagccgtaaaagattataaaaaaatacgcagtggtgccggtttttcctatcagatagcatccgggggggcggaaagttcactggcgcatgttaaaaaccgcatcagtacggtgatgcaaccggttgttgttcctgctgagttatctatttttgctgacgaactagccggactgaaaaaagaagactggaaaggtgagttgatttatcagaaggatagtcacacaccttggtgtaccttcacctggagtaatgacgaaaatgataaaaacaatgaggatattaatgttcgttttaaatttggattaacgaagaaagatgtaagcggtgagttcagcgttaaaatcagcaaattatcaaattcgattccatatattgagacctttccggaacatcagcaatttttaacgcttaatcagtcagatgatgttaagctaaaaaatattcgtcttaattctgttcaggttcgtgatcttatctatcgcgctcaaatcgcagtcagacatatttttgactgggaagcgcaaatcacggaagaaccgaaatatgaagaagataaagaagataaagaagataaaaaagaaatactcgacttacatggggctaacagccggtatctgtgggagttatttttctatttaccctatctggtggcaagtcgtttttcacaaaatcgtctttattatcaggctcgtcagtggctgcattatatattttcaccttatgacggacaccgtttatccataaaagatggtaacgaattattacctccgccatattggaactgccgtgtattaacgcaggaagatttacaatataaaagtaatgactatgcattacctgacccttatgcgatatctgaagatgtgccttctcattatcgtaagtcggtctatttaatgtatatcgataccctgatttccgaagcggatttaaattaccgtcagctcagccgtgacagtattacccgtgcctggggattttatcatcaggctcagggaatgctgggttatataccaaaggagcacagcttaccgaaatggcagccatgtactgttaatgaactgcttgataataaaacctattctgtacaggaaagtaccaggcctgaattattttcaggaatatatccggaaaatatgcccaaaaagctcagaggatttttctggtacggcagtctgggcaatgaacgattccgtttgcccgttcagacaagtttactgagcaggcagtcagttctggagcaacgcttatttaatttacgtcattatctggatattgaagggaatatgatgaacctcccgttatatgcagctgcgtttgatccgttcgatctgctgcgttcgcggctgggaggaacctctgaactggcatatttacagtccgggtcattaagtattccgtcatattgtttccggaccatgctggaaaaagcaaaagaacaggcagcggcactgattactttaggggataaacggctcagttattatgagcaaaaagaacgctatcacactgaaaatatgcaattaaaggatgcggttgcgcttgcggatgccagtgctgcgattcagtcatcgctgcgtgaccagcaaaaatctgctctggactctctgaatgaagccaggacgatggctgagagcaaaaagacatattacggaagcctgagtacgagtacaaaagaatgtcaggccagaaatttattagtgagttcatccgtgtttcatggggttatttcaggtgctgctgttgcggcaggtattgcggctgcgattccgcgtgtatttggtctggcgcaggataccggcgaccatggtaaaacagcactgctctctgctgtgggggggactgctgcattaggtgcggaacttatgcgcggtactgcggagtatgttcagatagatgaacaataccgtcgccgccaggaagagtgggcatttttggcgtctcaggcagaaagtgaaataaaggtactggataaacaaattgatgctcagaacgtggctattaccgcagcagaaaacagtgttaaatatacaaagcttcttcaggcgcaggctaaaaacctgtatgactatttcagtcagacccgtcaggttaatgaaagtttgtacgaaaaaatggccaatattattggcttattgcatgaccagttgtgttcactggtcagaacattttgtgcattaacagaagcatcctggcgttatgaaacggatgattataaacggcagacatttattccggccgatctgtggagtggcgataatttaggtattctggtcggcgttaaattacagaaagcgttgctggaaatggaaatggcgtatacacagcaaaatacacgccgcctgaatatcacaaaaacgatttcactgaaatcacttgtcagtaatcatctggttaaaacagatgaaacagcgctgacaacatgggatgaagtaaaagaagcattaaaaggagcgaaaaaactgtccttcgggttatcccatcaattttttgatacagattttcccggacattatgcccgaaaaattcactctttatccgtgacatttccgacattattaccgccatatcagaatatgcgggttcttctggagcagacatcgaatacgttattagtttcaccggatattgatgcggttaaatccctgtatacatcagcagaacaaaaaaacagtgaatcaattatccgtaatttgcgggtgaaccagaaaatcatactctcccgtggctgcgatgacagcggagagtttccggaagatgcctttaccggcggacaataccatagttttgaacacagcggagctatttcacactggctgctgtccgttccccgtccgcagaatagcacagagctcattgataatcttaatgacattatcattaaacttaattatacggcgaaaagtggtaatgatttctttgaagcggcggtcaatgaattactggaaaatacggaatcaataataaaagagtgcagcgacaatgattaaaaaatataaccagaatgaagttaagggacgtaactttatatccgacccttgttttgatgaatgggataatgaagtctgggataaaggtgagccggggaaatatgcaaggaaagaggacggagacaaaacttatcttcgtattcttggcaagggaagtatttcacaatcagttattttaccgaaaagaaattctggtaatccggtattgcctccttcttattcattgtcttttgattactttattgaattcaaggcagctgcatcaataatactgaaatatataagagggggggatgagagaaataaagaagaggttttcttacagaatgaaaaagagtggtgtcagaaagaattatcacttaatgtatcagaggaagataccgaaataaaatttgagttttatgctggtaaatcaggcgggaataaagcattgaatctgactgccgttgatatgcagttacatattggcggatttagtccggaatccattgtattcgatcatgaaaatatcccggcagataagccacagttacggcttaactatgggcgtaaacacattctcaatatcaggccgtctgatgacagtgcatggcgtgatcttgactgtgtactgaagtgggggagtgagactccgccatctaactatccaatcagttttgatcctgaactgaacaccgtgcaatccttaaaaaaagagggaagtgattggaaaatatcctgtttggctcaaaaagtcagcggaattccggagacattcaacataatgctggcgtcagaatacagtgcagtaccttttgttttcgatgcggaaataggcgattacctttataaatttacggaaccgaaaatcaccgggattgccgttattgctcaaaatataccggctgaagtcagtattcgtgttgtttgtgattatgatgaagaatatccggataagccgggcgtacccgatgttgatgttctctggaaaattgacggcggaaagagtatcagtacgaccaaaacagataatgatggtatggcggctcttacatttttaccggagcagggcgggaattataaacttgttgccgtaataaccgataaagcagggcgcaaaagccgccatcagtttgatattaatgtttatgaccgttctccatggctggatgatacccgtattgatattaacagtaccggaatcgactatcaggatgatgcggcttatctgatgaccgggacaacgacggttattcatctcaactgtgaaaataacgaaaatattttcggccgggttaagctcgaaaataaagagggaaataccggtaccagtatcataccggcggaaggtcgtgatatttcaccggaaggattgtcctgggatgttaatatcacaggcagagacagcagagaactgacactattattaaccagtgatcagtttgatatttcacaggaaatcggtgttattacattgcagcctgattgtgataaagaaattcagtcgttgaaagtgaatggtgaggaagcgaataaaaaaacaccgttaattatcattccggcaacaccggtaacactcaattgcagggtcaataaattattgtcccgtttgcaggctgaactgaacagtgaagaaagtaaattgctgacagcagaaccggctttcgggcaattacaggtactgaacaacaatgcagcagaatgggtattaagaagtgccggcccgcagggaggattctttaatctggatctgaacattccgccactgacaattccgctgacgctttccggccgtgcactgccgcaggaaatcgcctcaggaattgagctcattacgctgaataatacgccgctaacaaccccgggaaatttatttcttgcgccggggcggggctgtacactgacagtgaaacctcatcctttactgaaggatattcctgtttcattagttgcagaaaccagcaatgaggtttcggttatcagtaatccgccgtttggtcaggaagtcagtctggcagaaaacggaacctcctggcagatatctgctgacccagcttctgcacgcggaaaattctcattgcagattcagagtcagtggggcggagcaccggttcatctggatggtgtggtattgtctgcggatttacaggatgaaggctctgtctgtgtcactgatggtgacatgggcagaaaatacgatattgattttaatattggttttgcttttctggctttggaactctattcactggatctgaaacttctgccggataatttaatcagcggacaaaccgttttctgggaactgacggaaggagacaatcaccgggatactgtttcttttgatccggagatacctataatattagattcaccggaaactgattgggaattcagttattccgaagaagaaagcactcaattcgatttagtattaaacagtcaggataagtttagttataaaattccgtgccatatttttagcgatgaaaagtatctggaaaaaagtcaatgtatttttatgttgaatgattcggttattaccccgggtataaataataacaaccttgaatataagaaagagatatcacttaaactgaaattgtcacaagaaatatcagcatttttgaatggaatggtattggcattagttgttcataaaacagatgatgaaggtgatagtctgaatataacctcagataaattaatcactgttgataaaaataaacctgaccttgagtggagcgttgaaaccgatgtggcagtcggtcaccgttttacactggagattgttttggaaaatttaaaaaatatccgtgctgttatgaaatttacctcagtgtaactgttttacattaatcaatttaagtcgtgtgactaataatctacgtattaatgatatatggagagcgctatgtcagaaaaatcaaaaagtatctttggtaaattaatagatacagcagataaaaaccacacatatatttatattaatttttcttcaggtgaagatattcagatcaatgttattcaaaaaaacgaaaaatcagcggaaataaacgatgataataataaaaatctgacattattactgtcagatattcagtctcagtttaaacaacaaggcatttcgctgaacagggttcaggggcaaccggaagagaaacgtaaattaactgcggagctgaaaacagataaagtatcgctgtcagaaactgaagtggccttgcaaaaaatgcagttccgggcactggagctgggggctgaactggtgttaacggatcgcccggcggagatggcaaatgagcggtggcggttaccggcggtttccggtcaggagaaccgttctgagagcatgacggcggcagagggactggcgaaactggccgttgccgttcaggcggtgacggaccagtgtccgttacagattacactgatgattcagcctgatttacggccacaggtgatactaaacgtctctgccggtgaggtgaactggatttttgcggcaacagagggccgttatccggtgaaagatttactggccaaaatggccggtaaaacgatcacgaatggctgggatgcggttgtggtataccagcgcggtcaggccaacatgctgcttaaacagcagcatattaagcggtttgttaccggcaatgtattagcgccgctgaatgaagatatcgattcatcagacgccacccggttacagacacataacctgacactgagtgccccgtatctgtcattcgacgctgcagacaccggggattcaatggcacgggtcggttgggattttgtcaaagggatgattatttatacacaggaagcggatgacggatcttaccgtgttaagaagattgaaaagatcaccccgctgaattccccgtttatcggtatgaaggtaccgttgtcaagagcgcccggctcagtaagtaagattggtgaagtacagtttgatattaaagagggggaccactttaccaataacctggtggtaaatggtatggggcaggaaatgatcagcaattttttcaagcggagatttgttgcaaccccggacgaccagcggatctataagctgggcaccatcagtaattatgaaaatcaacaatttcagcctgaaaaatttgatatccgcaccatgggggcgccgaatacagaatcccgcgggtcacaggatgaaggtgatggtgcggtggtgttatttgtgcagatgaaagacagtgactcgaaaccggtggaaaaggaaactgactggttattagcggatggttatagttcagcattgatcgtttctaatcgttttttatttgacagaataatcagaagaaaaacagaaaactcgttgggtaattatttagaatttaagccatatcaggaaattagtggaagcaataaatcatggcaattagtagcgaatagtggatatttggagtcatattattataaggtgattaatttttgctcggaagattcttatcctttaggtgctcatattgttatgtcatgcagttttactctgaatttcggagaaaaagataaggctttagtaccgttatgtatttattctgatgaggaaaaatataatattaagatgaaatatggttttaatacagagggtatgatttatgaatttcagtatattccaagtgataatgaattagatcctgacaaagaagtttcagcgggagtttgtaaattaaaattgaatgtggaaacgtcatatgaaacaaaaattgaaaatgatttaattgtttttcagtgtgataaaggtaatattaaggttgaatcagagtgtagtgggttcaattctgaactgattaccagatttgatggaacagcaaaatacagtgatactattaatgaaggcgttaatgaaagggtagtaaaaataatttcagagtttaagctgaatgacattaatacctttgtattgcgaaatttattgtttcccgatagtaattacttccgctctgaaactgcttttgttcccggcgatctgttgcttcaggggcagttggctcccggctctgaatcatttgctgttacacccactgaaattaccattgttgccggttcggaatatcagtttacaaccccccctgaagtcagcggtgtgaaatggagcctctctgattctgaaaaaggcaataccaacgctgatttagggcatattgatgccaagacagggaaatataccgcaccacaagctaaggcaatcacagaaggtgtgcgccatgtggtggtttgtgctgaaaaaggggacaccaaagtgtatgccctggtctctgttcttgctcatagtgtaaatatttcaccggcgtatcaggttattttgccgggcaaatcctccgcgttaacggcggaatcactgaaccccggggaactgacctggacactggccgataacccgcagggttcagcactgacaaaagtcagcaataacgaatatacctatacagccggtaaaaagaacaagaaattaaaactgaatcttgaacgtatttcagtgacggatggaacgggtacaacgactgaagcaatgattttagtccggaatgtgctgttaaccggatatatccgggcatcatatgacaatatgccggaaaacagtgtacagctcacctatttccctgaccctgaaaatgcggaaacggcaataccggcggatgaagtggaatggacactgctggaatccggtggtgcaacgcttgatcctgaaaccggtattttatcctgcaaacaggcgacagataacggttttgcggttatcagtacaaaatatttcgacgaggatgaaggtgcgctttattgcgcgattgcgatcccgctgccgctgaatacctataaagaaacaatactggctgcctattctccggagcagtcataacccgacccggtgccgtgtatgcggtaccgggtttttgtcattttatctgttacagacaaaggtaaggttatggaaaatactatctggtccggcgacgctgttacgataacgccgccgtctttaccttccggaaatgtcactccgggagggatggaagaaaccgtggccggcgccggtgctgacggtatggctacagcaaatattccctttgcggtatgtgcaggaagaggaattgcaccatcatgctctctttattacagctctgcatcgggcaacggtgaaaccggtatcggctggtcattgcagaccgcctgtatctcccgcagcacattacacggcgtaccgcgttatcaggatgatgatatttttcttgccccggatggcggggaattaacggaataccgtgatgataacgggctgcctgaagtcaggagtaacattcaggtttgtcagggaataacccttgaacaaccttatactgtccggcgttaccgcgctcagactgaaaaccgttatgagcggatcgagtgctggacaggcgaaaccgataaggcacaacagttctggctgatctgtcacaacgatggtgcaattacctgcttcggtcattccgccggtgcacgggtagcggatgaaactgatgcgctgcggatcagtgaatggtatcaggaagagtttctggccgttaacggcgaacatatctgctttcactaccgccgggaggatgataccggggtaagtgacggagaacggcagggcggaaataaccggctgtatccgcagcggacagattacgcgaatgtaaaagctcacggaagcctgtattgcctggcgggggatatgcccgcgccggacgcttttttattacacattgtttttgattacggcgaaagaacattacagaaagcggaagttccgccgtggacagccgctgccgaatccggctggttgctgcgccgtgatccgttttcactctattctgccggctttgaaacacgctgccgccggttatgccgtcagatcctgatgttttcccgcaaagcggatgatctgaaacgtgacccggtgatggttaaccgctacctgtttgagtataccgaaagcccggtgatgacctgcctgagccgcattacccggctggcgtatgaaacggttgatggtacgctccgtgttgcagaaaaaccaccggttgtttttacctataccgatgcaaaactgaccaccggtcaggcggattatgttccgctgatgaactggccggaagtggatcgcgcaaccgggcagctggtcgatttatacggtgaaggctatgcggggtggttatcccggaatgaaggtgtgtgggggtatcaggcaccggtacgcagtgaggttacaccggacggaacagaatatgcggacaggcagccgctgccgctgctcccctctgagcagggagatgaaaacctgctggcggatattaacggtgacggattccctgaatgggtggtattacgcccggatctgaacggcttttttaccctcaatcctctgcagaagaacaccggttttaccccgttttctgcttttccgccggaattttttcagcctcagagccagtttgctgatttagccggtaacggattgatgggaattgcctctatcggcccgcataccgtgcgtttttatgccaacaaccgcgaaggttttgaaccggcagtgatcacctgtaatgacgaatgtctgccgttaccggcttctgatgcccgtgaatgggttgcactggcaaatccgctcggcagcggcggagcgcatttaacccgcatccgctataaccgtgttacctgctggcccggtaatggttacgggcagttcggcaaagcggtcgaactgcatctgccgggggagattgataaggaaacgcaattccgcccgcagcacctttatatgacggatattgacggcagcggtacagatgatcttctctatgctgcgccggcggggctgaattattaccgtaatctgtccggcaacggatttgcggagcctctgctgatcagctggccggacggtttcgcctgggatgatctcaatacactgcaatttgccgcactgagcggacagggtgtcagcctggtggtcagtgagcggcacatgaaagcacgtcactggcggctgaatctgacatctgagcagccgtggctgctgaaaaccatcactaatcactgtggattttatactcagctcagttaccggagttcggcagattactggctggatgagaaactggcagaaccatcacgccggagccggctcccgctgcggttatccctgctttccggtatacaccgccgggatctgatcacccgtcaggaacagcatacaacctataattaccggggcggacgctatgatacggataaacgccgttattgtggttattaccgggtcgatgaaacggacgactgcggtgagagtaacaaacgcaacgatacgccgttgcaaagaccgcgtctgcggcgccgctggtatcacactggcgcggcaggtgatgctgtaaaacgggaaggatatttttcatcaccggtaacatcagattctttactgacacgctggcaggagcgtaaagaccggatcattgcggataacagcgtcccgtctctgcattatgccctgaaaggcgcactattaagggaagaattatttgattcggaagatactgctgttccgttttctgtacaggaacaccgttatcagatccgtctgcttcagcaaaacggggatattatctgcgcagcgccgctgttactggaaaccctgagtattaattatcagcagtcagaaaaagacatcgcctgtcagcagcaaattgtgatggattactctgagtacggtgaagcgttacatgagataactgttttcctgccgcgtcagagcggcgttgaggaaaatccgtatccggcggtcacaccgcttcagtggcagaattcattcgatgatgctcagaccctgtgctggttcactgaaacccgccgcctctcactgagtatgatcacgcctgaccgctggttgccggttctgccggaatgcagctggcaggaaagcgtttctctgaccggcaatgaaatgaacggcaataccatattcagccgggaaatattacaggcgaaagacaatccgctggcgggaaaaccccggacattgctggcgtggcagaaagagtgttatcagcaggacggcgcagagattaattatccgccccgtgttaccgggcaggaacaggcggtatttaatgacatcacactgcagccataccacgcacatctcagtgatgatgaactgacacagcaactgagtgcggcaggctatcagaagcggacaccggaagaactgaagcaatctgtctgggtttcatcaggaaacacactgacgtatctggatgcggacgggttttatttaccggcggaaagcaaaaacccacgcggtggcgttcagatttttcattacaacacctattacagaatggcggatagtttcacggatgaatttggtcagaaaacacaggtgacagaaattgatgagcgattctggcagccggtacggatctgcgatatcaacaataacaccagtgaagtccgtttaaatgcatttggtaatattatcgccgccagtcagtacggtaccgaagggggtaaagacacaggatttaaaccggtatctgaattaacgctaccggagccactctcattaccgcaggtgatttataacgcagaagcattactcggcggactggcatcggtcacgttatatcacgaaaatgaactgatgggcgcgccggcatggaagataactatcagtgcgtcagattaccccggaacaccggacatggcaccgtaccgcattgatattacctattttgatggtacagggcatccgcggcagcagtttagtctcgatgagcccggtgcggcttatccctgtgccggcggtgtgttattgcaggatgataatcagctgaaagaagtgatggcagatacccgctggcggatcatgcaagcgccggaaaccacattatcaggtaatgccatccgtcgtttcagagcctggttttctgacagttatgaacccgttattgatacccatttgtcagatcttattccgtgcgaagtgatcggatatgacgcacaggataagccggtatttgtgcaggatgcggaaggatatctgcgttatcagcgttatttcccctggtttaatctggactatgatgagaacgatactctgtcttccggttttgatcttctgcggctgtttcagcgtcaaagtaatatatctgccgggcccggtaactatgatgaattatttatggaacggggtatttacgggcaaatgacggaaatagacaagccgtattcagaaaaaatatatgccgataatattcagcgatattattttaacggcggacgggaaacctggttgccggatgctggtattactctgacaccggggccggatattctcaggccttatgcaatgcttcaggtatggtacggagggaataataatgatagctaaattaatcattaccatcctgacgaacagatataatttaagagaggcataagatgctggctaccagtaatgtatttaaccggattgactggtcggaagggaaagttatttcaaccgggagtaatgaatatcgtgaaatttatcaatacaataaagaaaatggtaatatagagtatgtatggtttgtgattaatggggtggtaaggtgtttttgtcaatcggaatatgataaaaataaccgtctgagtgatatttatgttaatacatatgtggctgatagtgtagaaaataaatccctgctatatacaaaattacgttacagttatgattataatgaccgggggaatgtaaatacaacgaaaatttcatcaggcaatatactacttgatcctttaggtgtaaggaagggtgaggactgggagagattaggtacattgatttttaactatgatgttaatgatcgtgttgaaatgacagaacttaatctattttcacctcctgatggcagccgccatagtgagcaaaggagtgagcgtaattataaagaattacgtcagtttaataacttaggtaaactgacagattgcagatatagtggtgatttgtcactgacaaataatatgggcaggatactgtccggtcagagctatcaatataatgaaaatggattagttattcgcagtatccggcgtttcagttcgggtgtcagtgatattattcgctattgctacaatgacaaatcaccctgtttgagttcattgacacattgtccggttaatatgggatggccggaaacagaaaaatatacgtggaataaggatggtcagctgatttcccgtctccgcccggatgggtataaagaagagtatgaatatgacggaaaaccaaatattaccagaatgacgataattaatccggaaggcgggaggaccataaaaacgtttctttatgatagtcacggacatcaggttattcagactattcagtttcctccggaatatccgggtggcccggctgttttccggcagattaatgatacttacaataatgactatcttatgacccggaagatttttaatcaggtagttactgatacttcagctgtcccggaagaaacacatttttatcactggtttcagaatcaggttattgcggtgtctgtgcagaacaattcgggcaatatcaaaacacattttaattttaaccatccggatggtacggcaatatgccgtttttcaccaataacgcagagccagaatttaaaatcgggagtctttaattatagttttagaatgcagtggattgcacaggatcagcagggattattttatcagccggaatttattgagttacagcaggcatgttttgaaatgcatctgactccgccgaaagtataaggaaaaaatatcatgaacttatctgaaattggtgaactgtgcgcagacaccccccggatgacggtatttgaccccagaggactgactgcaagggctgtggattttaaccgcaaaagcagtacagatatacccgaagcactgataacccgctatcagtacggagaaagaggtgaaatgcagatgtgtgctgatccgcgtttcagtgtctctgcactgggaaatgaacccggatatcagaatctcgtttctgccacagatttactgcagcgccctgttcatcaggtcagtatcgacagcggtgaatcattaagtctgttgcatgcggatggccagcctgaatggacaacaggaaatcccggagaggaggcagtcagccagcgttttacctacgatcgtattggacgtttgctgtcacagcacagtcttaacggaacagaagagatcttattacagacccggcgttacagtgatggtgttgataatgccgaagaatataattgccgggggcagtgtacagagatacagaataacgccggaactgaaacatttacggaatttgatatctccggcaaaaataaaacattcagccgccgtttctgggcagtacgtgaccggagtgctgatttgaatcatccgcctgaagcagaaatgcggatgtggattcaccgtaatgatttatcggcatcaggtaaagtccggcaattatcgttgtcctgtcatgaatccggacaggaacgcgctgtttatacacgccgcaatgggtacaaccggcgcggacagcttatcagcagtcatctgactgatgagggcggaaacctgcatgcattactgatatcggcagattatcatgcgaatggtgcgtgtcagcaggaaatgctgggtaatggtgtgacccgttattatgcacaggaacatttcacaaaacggctgttgcgtatttcaacctggcgtccggggggaaataaaaaacgttacccgattcaggatatttcgtatcagtatgatcctgcaggaaatgttactgagcgttatgatctgagccgggaggatcagtattttgataatctgcggatcacggcacataatcagtatcactacgattcctgctaccgcttacgccgcgctgaaggccgtgaagcgctgaatggcggaaaaagtacaataacgccgcttatcagcggatcacagcagttagtgaattatcagagatggtataactatgataatgcgggcaatatgacgcagcttcgtcacagtgccggacataataactggactcaggttttttctgtctcgccggagagtaaccgcagtttaccgcagccggtttcaccgtatgaagtggaacgcttttttgatagtttcggtaacctgaaagaaagtaacggcgtgcattttacccgcgactcacagcagcagcttgtccgcgcggatggtgcacggcgggcaaatggcgcgtcggactatgagttttatcagtatgacagcagcggtcagcgttgcagtaaactcagcagccggattgctgacggtatcactcaggcccgccgccgggaaacggtgacgtatatttccggcatgcgtttgtgtgagtatgactatgatggtaaaccacagggcagccattattcactgagttttccgctggccggccattcggcggtggtatgcctgtctgagcgggagccggaaaagaaagaaatgcccctttctctgatgcgttataactgccttgatgcgcagggctcggtcgcgctggagctgagtgcagagggcgatattattacgcaggaggaatattatccgttcggcggcacctcactgttcagttcgcggagtgagagtgaagcagactataaatatcaccgttacagcaataaagaacgggataatctcaccgggctttacgattacggattccgttattatgcgccgtggttgtgccgctggatctcgcccgatccgctgggaacagctgatggtatgaatgcttattgtatggtgcgcaataacccggtgacatacagcgatagcgccggtctgatggccggagctgaggaatttgaaatgcgggaactgcagataccgtccactcagcgaagcatggcaccggcggtatataatacatcgcatccgttgcagcaaagccgcggggaacagttgcgcgctatcagcagggtactgacccgtcctttagcagctgtcgcacggggaatcgcccggatagggcgggcaatcagaagtgttatcagcgggatccgttctgcattacagcgtttcagaggtacaggaaatggtgctgaggacctggaaatgcagccattgctggatgaggaaataagcggtttttccggtgaaacggaaacatcatttatcagcgcgaaggcggacgaaggagatattctcaataatcctttagtcagaaaacccgaatatatgaaggatgaaacagataactggcgtattcgtattgataagagtgtgcttatgtatgctgagggttatgtcaatccggatgagtttgtcagactggggttggttgagagggaaataaaccgaaatcagtatacagagccgggagaggatcccgattataaagatccccccctgtttgcagaattaaaacaggatttacagggaatttttgatgattatgctgaaacatctgattttgacgaatttactcatgacacaacaccacttctgtccggcataaataatgcagcagtaccggcagccatttcatcactggtattatctgcctcgattttcagcttgctgtggtggtatcagtctcagcatacctaccgccgctgaaacggatacgttgttctgtaaaataaaaaccggctctgttaaaggccggttttgttatttctgtgtaagttatcagaaactgtaacggatacccaggttgccgctgtaaggggtttccacatggctgcctttggcatagttgaactctgcataggcggaccactgattattcatctgcgctgtcagacccacgccgtatttaccgacggttccggacatatcattgctgaatgattcagtgtcattaatcaccacatcattgttctttttgaactcgtggctgaccgccaggcgagcataaggtttaatcagaccaccgctttcagtgacaaacgtcttaccgaaggtggtaccgatttcacctttaacagattctgcagcatccgctttcactttcatgtcactgctaaaacggtaggctgttttttcgccgcggaagtaagatcccagtacataaggctcgataaagtaactgcctgcggtgatgtgtttaccgccttccacagagaaaccgatgccgttggtgttatctttggcggtggtttttccgtcattaaactgcgcgctgtttttggttctgaaatggttggctttcagcacgccatccacatagtagccgctgttgtgcatccaggtggtatagacaccaagacctaagctgtccaccttgccgtcactggtgcgggcatccagttctgaatgggtataggagaacattcccccgaccagcaggcggccgttttccagcgcaatcgcgtggtcgccgcccagcatcagtccgttcatatcctgggtgtaaccgacattgccggttgagatgcggttacggctgccgatatatttgccccacacaccatcctgcgccgtctggttatcacgaagatcgcccagccgggttctcagtgtggataattcgctgttccagatagttggcgtcacgttggccatcgcgatagcgtttttcccgctttcggagatttcaggcttcggatcagggcccggctccggatccggatttggtaccggatcggttgctttcggtgataaataccagttgtcgctgtcctgctcatcaccctgtaccaggtaatatttgtaagcacccagatcaacactgccgtttaccagcgcaaagctgttgctgtcactgccgttggcaaagatcagatgatgaggattcacaccgccgcggcttttcagctcctgaccggaatccattactctgacattaaactcaccgctgatactgttgctgatattcaggaaatcaccggtaccaccgttaatattggtgttcatcacaaaggtgccggaaccggtcagatctgaaatctgtaaccggctgtatttaccggcgtcagtgccgtcgctgctgccgaataccacggtaccgttgttagccagtgtttcaatcgttgcttcggattcgctggtggtgtcattatgcttcagatacataaacgcattgtcaccggccagattaagacgggtaacataagcgcctttgccgtccagagctccggtccagctgtgaagactaccgccttccatcgttactgaaccgtcattaacattcaggtcaccggtggagtaggcaccgtaagcgataaaggatgaacctccgttctcaacggtagtatcctgaatatgaccaaactccttgaccagctgtgtaccgccgttaaccagcgtaccaaccgcatcggcatagtattcaacaatctgttcaccgccctggtggatcactgagccggtggcaacctgatctttgccaatccaggcatcctgctcaacccattgtccgccgctccagccgccttttttgccgctgacaatctgctgtccgtaaacccgggtatcaatggcttcgccagtctgaatacgctgcacaccgccggcataaatggtggcatttttggctgtctgatcatcaatccggaaagaatcgtcggatgtccactcgccgttttcccattccccgtcaacaccggtaataatctgggtaccgtaaacacgggtatcttccgcactaccgtaggtaataaactgcaatgcgccgtgattaacgatagtattgcggtcagcgccttttccggaatagatttgctggacagcaccgtcatacagcaccgtatctatcgtggtgccgctgctcatctgatagctgccgctgccgatatggctgttggttgccgtaccgccgtagataatatgctggccgccattcacgacaatgacatctttggtatttgaggtgctggtaacggattgctccagataaccgccgtcgatcaaaattgcctgtgcatagccccgtgtaccgacaaccattctgccgccggtattcactgtggtgttatacgctttggcgtcattccccaggctgaggctgccgttatcttcaacaatagtgttatacgctatggagtcttccatcatcgacataaatccgcgatagactttggaaggatcggacggattggtaattccgcctttgactatatttccgatagcgacactgccgctccggaatgtggtctggaaggaatcaatggtgttattcaggctgtaagaattattctcaacataaagaaattgttccgggaaccaggttctggttaatgtctgaccattaatatattggttaccggtgataattgactgatatttattatcccacttatcttttgcggtcggccagccatcagtggcactgctgagaatggtattaatatcaggaacttcaacttctgactgataaggtggtggtggttccgtggcataagcgctgaaagaagcggaaaacagtgcaatcagcactgaattattaaatgtcatatccaagtccttgctttaaaaagcgaattaaaattatttatcagattgaatgtggtgctgtgagctgtaagaaaatcgtccggaaataaaacggaatattattttttaacaggtgataaaataatgaaacagccggtaaataccgtctaccggaattaattcagatatacagctcgttaataagaaaaataccactcagacgcgtatgcctctactcacctgtgttgtaataaggcggtaatgtgtaacaatttgagaatagtaagggaataacagtgacaggtgaaaaatacgggatggtttatcaggctgtatctattttaataaattactttcagaggcaatgaaaaatattccggttcggatattgaatgaagtaaggttttttatggtgcacattacaagtgctacgttatttctataatattcgttgcggcggagtagtgttgaggatatctttttgtcaggacccacaatatgcccctttttatacattgaccgttatgttctgagctgacaccccaccacagcagataattcagcccgggtgaggggggctatggaacctaccctctcacgcaaactggcactggctgcgcttctgccgggccaacaacctggtacagagtatcagccggagtggcaactgccgcgataacgctttgatctaatcgttttactgaaaaaagagcgcatcagaaagcgtatttataaggccggagtttggcccgaacagagatcttcgattaccttagaatgcattcattttagttataacttaactttactattttttaatgaaactaatttgcaaacgagacttattatcatatatacttttttacagcctgcaagatattcaatagattaaattaagcatcacttcactatggagaagatcgcaacatgttgaaaaaaatgttttttttatgtaataagactcgtttgattacgttggcatcatcgcttatggttacctgtgcattaccagcgatggcaaaagattccctcactttatataccacacgtgaaccgggcttaattcagcctcttctcgatgcctttacgaaagaaactgccattgatgtaaatactgtctatatcaaagatggtatgttagaacgagtaaaagccgaaggtaaaaactctccggctgacttattaatgacagttgatgcaggtaacctcatcgatttagttgaagcaggtgtaactcaacctgttcaatccgaagtattaacagaagttattccggcttctttacgtgataaagacaaccaatggtttggtttgtcaatgcgtgcacgtgtgttgtatgcagaaaaatccataccattaaacagcatcacgtatgaaaacctggcagacccgcaatggaaaggcaaaatctgtattcgtgcgggacaacacccctataacacagcattagtagccgcaatgattgctcatgatggtgaagcgaaaacagaagcgtggttacgtggcgtgaaaaataacttagcccgtaaagctgctggtggcgatcgtgatgttgcccgtgacatcctcggtggtatctgtgatgttggcttagcgaactcctactatgttggtcatatgaaaaatgcgaaagaaggcactgatgcccgtcagtggggggatgccattaaagtcgttcagccaacctttaccagtggcggaacgcacgtcaatatcactggtgctgcagttgcccgcaatgcgccacataaagaacaagctgtgaaattgatggagtatttagtttcagttcctgctcagcagctgtatgcgcaagctaactacgaatatccaatccgtaaaggggttcctttggatgcgacgatcaacagtgcgattggtgaaatcaatgttgataacattccactggctgaaatcgttaaacaccgtaaacaagccagccagttggtagataaagttggattcgatcaataaaacaggcttatctgatttacgtggcgccgcaggagcgccgcgtttcggtttttcgcctttaagtcttactgtggtggtcattacgcttggtgtaatgacccctttgttattcctgttatggctcgcggtaagctcaggtgtcagtcattgggaacatttactgaagtatgtgttgcctgatgcgatactcaataccctgattttattacttggtgtcggcgtactggtcatgcttattggtgcgggttgcgcctggttagtcactgcattcgatttcccgggaaagcggctatttagttgggcattgctgcttcccctcgccatgccaacctacatagtggcatttgcctggcttgatttactgcatcccatcgggccggttcaggaagtcattcgcagcctgttgggctatagcaacccccgtgagttcaggcttccggatcttcgctccatgaccggcgcgattttgttattgggtctggtgttatatccgtatgtttatctcaccatgcgggcgatgtttatgagccagccggcgcatttactggaagcagcccgcacacttggtttaagttcaaccggctcatttttccgggtggcgctgccaatggcacgtcccgcactggtggtaggaacaagcttagcattactggaaacactgaatgatattggcgcatccgaattccttggcgtgaatactctgacagtcacagtgtataccacgtgggtgacgcgttctgatttggcggcagcagcgcaaattgcgtgctccatgttgacggtaattattctgttgctggccctggaatattatgggcgcaagaatcagcgttataattccggccggcaaatgcgggggattttaccggcacgattaacgggaattcacgcatgcctggcgactttattgacttctctgcctgttttactgggctttgttgcccctgcactatttctgggttgggaaagtatcaggcgttttagtgatagtatggaaatttctgccagcctcctgcaatcattacaaaactcattattattagcggcaggagttacccttgtggtgacttttgtcagcctgattgtggcgtggtatgcgagatcaagtgcgatttcggggggggctccggaggccagacgtacattgatgaaagttgcctcattgggctatgcggtgccgggaacggtattggccatcgggttattaacaccgggtatgtcgttggataatatactggccgaattgttcaattatcgcggtttaccgctgctctcttcgggggttttattagttatctgttgttctatccgctttatggcgatttcagtcggggcgattgatgccgggttaacccgtattccgccgggcatggaacaggcctcaagattacttggtgaaagtgagtcgggaacctttttccgcgtacatttaccgttattgcgtccggcattagtgacaggtgctttgctggtttttgctgatgtgatgaaagagttaccggctactttattacttcgtccggttaactttgaaacattagcaacatctttgtatgcagaagcggcgagaggtacctatgaggagggggctgttgcagcattactgattgtattggccggaacgctcccggtaatactattagcacgtagtcaattatcttcatccgggccaaaacaacgataatcagaagggagtcgtcatcaggtgtcagacacaacgttagttcttgataatgtgcatgtctcttacgggagtaaacatcaacgtaatcatgttctgaaaggcttttctttgcacattaatgcaggggagatcggctgtcttctcggtacttccggctgcggaaaaagcactgcattacgtgctattgcagggtttgaacgtacagagcagggaaccatccatgttggtggccgctgtgttgcaggagagggccttcatcttccgccggaacaacgcaatgtgggaatggtatttcaggattacgcgctgttcccccatttaaccgcagcgcaaaatattgctttcggtctgagaaaacaaccgaaaggatatcagcaaacacgagttcaaacactgctggatttagtagaattaaaagaacttgccgggcgttatccacatgaaatgtctggtgggcaacagcaacgtattgctttagcacgtgcattggcgacacagccggcagtattgttgttagatgagcctttgtcgagcttagatccggatagccgtaaacgtttagggctggaagtgagagatattttacgggaagccgggcaaacagcactgttagtgactcacagcgaagatgaagcacaattgatggctgacaaaattaactacctgaaaaatggcagattaattcagaatgatgagaaaaccaaaatcagaaatacttaaaataaaaaatgagataaatagtgcacgggaagttgatactacgattttattttttgtaccatctgaccgttcttttccctgtgttgttctggtttgccgcaacggggcatatgtgctatttatctttacaggatagtcttttagggaagattttcaattgaaagctgcaaagcatatggggaagatatctgattccgtatagcccggatacagacccttttgatccgcagtggtaaaaatagatttggaatttaatatgaaaaaacgagttataggtttgtttttattgataggactacctttggttgctatagctgataatattcacgtgacggtgaattcccctgtgtactcttaccctgataatcgggagtttaaagaaagtgtatatgtatgtgtattaaccccatttaacaagatgtatgccggtgttgatgtgaaaaaaacacaagcacaattcaacgccagtcagtcttgtcaaaataaagagggtagtaatagtattttttgtacgccaaaagatgccatgtgtactacagcaacggtgatactgagtaatggagatagtcgtcaccaggggctctctgctattgtattatttaatggatttgatcaaacaggtcagcatttgctggtcaatgaaagtattgatgattttagtacatataattttgataacaagatcatgtcgtttgatattccggatggatggacagtgcggtttttcaaagaaaaaaactttcagggtgactattatacccgctcttcaggaaagggaaatgcagatgattttccacacagtattagctcaatgaaaatacttcgaaagaaataaaaagataatgaaaatataacttgttaatttacttgtgtgaatggtgttaattttaatcgttataattgcgtttggttattttgtatttcgtgacctcgtggtttttattcagtatctgtataaatggtttctgagaaatttttagaaaaacatgtgatttatgattattacggatgaagcataccagggatggtatgtgatataaataattctgaataatatcaggtatattatcatgcacttataacatatgataacctgatttattactcattattttcgactattaaaacaaataataaaaaaataatatatatgttttccattctggggattttatgtcattgaacacaaacgatggttctaaagtatatacacctctctctttgtctctatatgactggtgggtgctaaagatatctaataactatgcatggcattgtaatactgataaatttttaattcctcactttaaatttcatcttggtaacaaccatatggatattggtgttggaactggtttttatttaaagaaatccgcagataaaattaataaaataacgctttccgatcttaatgttcatagtttggaatgtgctaaaaaatatatttctgatgaaaaattaaattcttgtttatgtcatgatatcttcaatagatttactgatgagttgagggggggatttgattcagtatccatattttatttattacattgtttgccggggaaagtgagtgataagaaacaagcgataataaatatcactgaaacacttaaagatgatgggattttatatggcgcgactattcttggagagggggttaagcataaccgttttggaagtaagctaatgtcagtctataacaaaaaagggatttttagcaacgtttatgactctgcggattcacttgaaactatgctttcgtctttgtttgaagatgtttcagttaatattcagggtacggttgcattattcactgctaaaaataaaaaataaagtgtagtaaaatataattatctgtaataaaagcaaatttcttatacaggtgacaatatattcttttttgttttatacatgatgttattcagcttaatcggatgactgaccggagaatattttaagaaataaaaggtggctttcacttcgaaagccactgtcatcataaaatgggggagatgtaaaaaagcaagcttgtattgttaatactcaacaagagtaaggttaattataggaaaccagctgctttaaattttgccagtgcatccgttttttgtgctgcagttaatgggcgtagtggacggcgggggtcaccaacatcaatgccatgtaattgcattgcaactttacctgcagcaacaccaccgtattctaccagcacacgaataattgcaattactttatccatacacgcagtgatccccttgtaatcaccattgttaaatttatcaattatttcaagatataaaggagcagcatagttataggtgcttcctacagcgcttaatgccccacacgctaaccctgccggtataaattcatctacaccaaatggaatgtcgtatttaccgccatcaacacgtaagcaacgttgaaattcgtacatatcaggagaattaaatttcattccggataaattcggaattgtttttcctgccgcttgtaaaaatttttccatgtcaatgtttagtcccgacatagtagagtggtagtaataaaagcctttagaaggcgagttcatcgctgctaaacgacaatattcaactaagtcatctacattgcccggtttaaagaaacaagggccaatcactgatgtagcttgaatatctaatgtttcagcatgacgggatagctctatagtgtctgcaatactgagagcacctgtatgaacaattatatctaattgtccctgactggcagcagcccagtattcagcgacttttttgcgttcttcgacagaacaatggataccttctcctgttgttcctaatacgtaagcacctgtaacaccagttgcaataagatgttctgcaattttatcaatgacaggataattaacactgccatcggcagcaaaaggtgtatgaggtgcagcgattaacccagagagttttttcattattattccttttggagccatgtttctttattgattatttaatggagtttgactctatattaagactcaatcgttcagaacgcaataatgaaattagcgttaaagaaagagaaaaatgaaagtgtgatctttagctggttttattcaagaccacataacactaattataaactcatgctgaattggtacttttcaatgcatttagtgtacgcagtttttgctctttgaccatttcaggctgagcctggacaagtagggtatacagtaaatctaaaacaaacagttgtgctgtttttgtaccaatagaatcaccttgtaatttcccctggcgattaccattaatcagataataattggcatattccataatgtgtgaacctaaattatgcgttagcacaattgtggtagcccctgcttcttttgcaagtttcagtgcatgaactgtttccggtgaatttccggaatggctgataccgatcgcgatatcacccggtttcaataaggaagcctgcatatacataaaatggttattggtaacagcatccacccgatatccaatacgcatcagtttattttttagatcctctgctgtgatccccgaggaacccacgccgcagataaaaacataattcgatgatagcaacgcatttacagcgcctttaacttgcgtcatatcaagtaaatttaatgtttctgataacacattattgatggttgcttgtaattttaaacctatagtatggatatcatcctgatggttaacttcagcatcaaggattggtgattcttcactatccgatgtcgccatttcaatggctaaatccattttaaagtcctgaaagcccttatagcccagagtgcggcaaaaacgtactacagttgcttcgccagctttagtcgcccgggaaagttgtgcgatggaaagctgagtgacttcaacaggatgaaacaggatatattcagcaatacgctgtgatactcgcgtcaggctatttttcattgcccccagtgtgtcgagtattttacctggcttcagtctggtaactgactgttttgtcatgaaaattatccttgtttgctgaagttcaaagggagtggaattctgctaacaagagtaccaattctggcgggttaaaaaaagccttgctctgataattatgtgataatggcaaaacgctttattccattgatatcaaagtgaaaatttctgatattttagaataaagcgtttaactgaatcggcaaaaattaattttccagcagggcagggtttaccttaatcacggctttttttaggatactatttccttgttctgaagctattccgggtctatggggctcgtaaggcataaaaacagcaaacatagagggggttaaagataatgtttgactattttcaatagtatcagtgagttgatagtcatcatctttatgataaacagtggcatttttagctgaatgacgaacgccataatctataacttcttcaccggatagtaatatttgtatatcaatgtagcgatgatgtaattctgcacatttttgttcccgggattgtgtttcaaatgacattacgttcataaatacatcattatcatcaataggatagcttccgggttctaaagataatggatcgagtgcgagtgccttttcaattatattacgtaataccaaattcatttcaggcattattgccacgtcagatatatgaccaaataacatagatacctcctgttagttcccggatatttcactatcatccaatgaaatttgttttgctgcggagaaaaatggcgcagtaattgtaccaacaataactactgacatagcaccaattacaccatagaagaaaaagttaaggtcactgccataacgggctgctaatacagcaatgatacttactataatgcctgcgaccgcactacctgcattagcacgtttaacaaaaatacctaacataaatagtccggtcataggaccacccattaaaccgattaagctgttaaaagcatcccatatttcagattcgtcagataaaaccaaccaaattgttgctaagctactgaatactccagcaataattataactaatctggcgactttcattttttgttctgaacgtcgttcaactttacttaagcgaatatagatatcagaattaaagcaacttgaaatactgtttaagctactggaaatgctcgattgagcagcggcaaagatagctgcaatgattagcccggaaatacccactggcatttctgtaacaataaataagggtaagatacccccggtattaaaaccttcaggtaacaaacctggattttgtttgtaatacacaaacagggctgaaccaatggcaaaaaagaaaacaggaataacagcaactaatttagcatttgtgattaaagtacgtttagtctgttcgatagaatcagtcacaatgtagcgctggacaacatcttggcttgcagtaaattgttgaatattggcaaataaaaaaccaatcattaatacaggaatagtactgtcagtccagctccagcgtaactgtgcttctgggaaaaatttatcagcttgtgctgttgtggtaaaaatctcactaattcctccatcaactttaaaacagatcatgataaagattaaaacagcaccacctgaaagtaataatccctgaatgacatcagtccaaataacaccttcaatccctcccatccatgtataaataatacataacaggctaatcagtacaactaatataatcggatctatccctatgaaaggacgtaatgcgagtacggtcaaataagtgataattgcaattcgaccaatatgaaataacataaatgacaggctggcgaataaacgacttcgtatatcaaaacgggcttctaaatattcataagcagaggtgatttttaattttctaaagaaagggatgtagaaataaaatactaatggcaaaatggcgatcgctaaatattggccaataataaaagtccaatcagaggtataagctttcgccggaatagacataaaggtaattgagcttaatgtagttgcaaagacagaaacgccggcagcccaaccgggaacccgtcccccggcacgaaaataatcatctgctgttttctggcgtttagagaaataaacaccaacgagtagcattgctgctaaataaccaaacagcactgcataattaacgaaaccaaaatcatgtagttgcatttttttagtcctgccatatgtaaggtaaaaggtaagaagtacgacagttttttagtttactctggcccagagagccgcaccccaaagtccggcatcatgatgatagtgagctgctaaaataggcacctgtaatgcctccggttgttgtctgatagctgtttgaacgagctcaatatatccgtttgctaacccgatacttccaccaagaacaacacagtcggcatctattgttgctttaatatcagcaactaaattagctatagtatttgctgagttttcaattattgtcttcgcctgaaggcttccctggtgataggcagcaaaaatagctttcgcatctttccctgcaagttcatttacagcttgtgaagcaatggcacggccggaagcgatagcttcgacacatccataacgaccacagccgcaaagagggccatgaggatcagcaatggtatggccaagatggcctgcaatacctcgttttcctgcctgtaattgtccttgctgaatcaagccgccaccaacacctgtcgatactgtaacaaatgccatatcagagatattttcatggcggtaatcatattcagcccatgcagcagcctgagcatcattgagtaaccagcaaggcagatccgttaatgcagagagtatttttttcaacgggaaattttttaatccccccagattatcggggtttaatgccgttaatacaccatcacagatgatccctgtagaggctacggcgacaccatctgcatgtgcttttagtggtgttgttatcgcggccagcgcttcatagagctgagttggtgatgcacttgcaggggttgtaatttgagtatgctgtgtaagttgattatcccggctgattaatgcagccgaaatctttgttcctccaatatcaattgctaatatattcatttaactaactcctgctgtaacttgagcgcatgagtaaaccaaccacaaacatgttcaagtcgggttaatgcggaaccaacagtgacagcccaggctccggcttgtatggctcttgctgcaattattggggtgttataacggccttcggctattacacgacacccattttcagccaatgcagtgactaattgtaaatcaggtaatttcggtatttcgccacctgtgtagcccgacattgttgaaccaataaattctgctcctaatttccggcaatgcattccctcattaaatgtggagcaatctgccatcgctaatttattaaggtggtgtatgcaagccagtaactcattaattggaactggacgtacacgatccgtaccatcaaaagcgataatatcggcaccttctgtcgctaatgcttctgcatcacttaaccaaggcgtgatcctgaccggactatccggtaaatcacgtttgacaataccgataattggtacatcaataagggggcgggttgcttttaaattatctatcccctcaattcgtactgctacggcacctgcatttacagcagcccgggccattgctgccacaatttctggcttatccatagggctattatcgacaggctgacaagaaacgatcagccctcctttttgttgaatatccttagtcattttttcaattaatgccattttgaattcaccattcttttttgaaatgcaactccatttgatattattttatggagtgtaatttctcaattgagaaaggtgtaatttgtgaaggagatcaaataatagagtgttgcatttaattggttgataaacatataaaataatgtagtgaataatggggtgattattcactacaaggtttggtattatgttatagaggacttaaaagtggaattgtaatcctaagcgataccgggtttgacgggcgtcactggtcggtctcactgcaacatttccaacttcaatataaggagtaaatgtgtcattcaattggtaagaaaaaaagacattatgttcataattacgtttcttattatcatattttatagcatcgctatacatttgtgtatagtcatattcaactttgtatttactatatttataaccaataaaagtatcaaagcgatttgttttctcgtcgtcaacaccttgttttgtttttctggcataatcaaaacgataacgaccagcaatatataaaccattatcaaaattatattgtgcctttaaataaggtttgtaaattgatgtgtccgtaactgtttcgaatattaagcctggttgtaacgttatattattatttatcttatgattgtaactcagccccatttcgatggcattattaacaacatcactaaatactttatctttttcaccatcaacaccacctgattttatactggcatcaatataaaaacctatgccatttgaaaatgaatgaataaacgcaatgcggtctttatttattctcgatgaatctgaatattcatgacgaaagtctagtgtagtcgcatttaattgaagtgatataaaaaaagtacaacatgccagcaagattttattattaagcataatttttacctgagtggataggatgccataaatttaatatagagttcttggttgattattataatttatatatgtgattggtttagttaataattagatctttatcttttattgttaaagtgattacagaattaactgcctcaccttttgtagtttcaccaccgattaaatatagtgaattaccatgctcaatagtgattccataaccaagagggatcggcagttcaccaattactttccattgatcatcaatcaacccataaatttctttgtgccattttttatctaaatcctgatgtgcaaaataatgtttctgtgaatacttagcctgagagcccggaaagttagtaccaccagcaacaagtaaagtatgagcgctataacctgcaaatgcaccagctaagccatcttgctgctgctcaggtgatggtagaggaagtttctgtacagtagtattccactgtagttgattattttctaatagagccgtttgtatttcactggtacgtaacccgggttttaattcgccgttaatcaaggttattgtattgttattttttactaatgaagaacccgcagttccattaaaaggaatagtacctaatgaattccattgattattatctgcattataagtcagtattactctattaaaaaaatagctttctataggtttgttaaagtaatcattaataactttatttttcatgggtgaattgtttttagtattatttaaatcaatgaaatatttatcaaatatttgcttgtttactcctccgagaatgatggctttattggtgctgatactaactcctgcatgaccaaccaagccataaggtgagctggtgtttatttttatccatttgtcttcacttggtgaataacgataaacatctgttaatgagcttattgtttcactctcaatattttcttttcccgctccgccaaatatataaatatcattatttaaattaattgctatagcctggtctcttggcgtacccgggaaatcagctattttttcccattttttattttcattaagatcaagtttataccatgagtttcctgtactacctaaacctatgtaaataatgttttggctaattactccggttccattttttaataccacaggaaggtcagggagtttatcagcaaagctggtcgatgagaatgttggtgaagacagtattatggtgaaaaagagataaggtattttatttattattttcatatgcattcactcttgtggtggttataagtgagatttcaatttaaaatataattccaacataaaacatcaaatggagtaaaatttcaaattgaagttttataaaatgtgaagatgatcaagttatctttttaaactctatattttttccttacctgaaggtcagtcttaatttaattttgaattaacgtgagcgataaaaacactggttactaattgataatattgatgtttatattgcgttggtgatataagaacacgcaagctatgctaacgcttactgttataaaacattccgacatagttgaatataccgctccgggtttctttccgtattccggataggactcattaaatagcgcagaatactgctgcacctatcattttatgtacatctgccagacacattagatcgtagcatgactgtatcagctcagacttaagctgacaggtttcgtcaatagaatacaatccaacctgacagcctggtgtgaatgaaaagctgaaatcgacatatctgttaaagttaatggttcgtttttccgggatacttacactttctttatccgtttctgttcacaagggtcgataccctcagcaatctgcttacgtgcgctgtctcttttatcacgtgcgtcagaaagggataattcaggataaattcccagagccaatgttttttttccctgaaagcggtaacggagtcgccagtaacgtgagccgttgggatgaacaagtaaaaacatgttgccggaatcagcaagtttatagggtttttcttgcggttttgcagcccgaatcttagcgtcagtaagtgccataaaaggggtctccggaagacgagagggtacaaattcctgtcgaatcaggctataccctcatttgtacccgcgcaagtgacttgatgcgggtagaatttggttgagttggattgaatgaagaactacggagaagtagatatctggcgggctttataaacgaaaacggacctccgtagagatccgttgacatgaatttggtgcccggactcggaatcgaaccaaggacacggggattttcaatcccctgctctaccgactgagctatccgggcaacgaggcgtattaaacccgattccgttcggggcgtcaatcttatttccttcaaatttaatcaagtgccggttttttctgcaatttactgaagttttaatcaataacgtctgtttttacggcataacacgtaaaattaccggcggacaactgcggatgctgcccgccggaaagtttaacggcggtaacctttttgcaggtcgtttactttgcgcaggtaattgcgggattctccggacgggtgttttgtcgtcagggtttcatacactttacccggctccataccgctgataatgcgggcggcctgtttcttatcactgtggaagacacgcagcacactgcccgcaccgccgttgtaggcagtgatcaccgcatagcgccgtgatgtcgggttgctgatctcaccgagataggtattctgcagaatcgccagatatgcggtaccggtatcgatgttgcttgccgggtcaaacagatagctgcggcccggtacaccggagcggccctgtgatttaaacacatcacgtccggcggtgttcggcataatctgcatcagtcccagcgcatcagagcggctgaccgcatacgggttaaagctggattccgtctgcataatcgcaaggatcagagactcttccacgccgtatttggcggatgcctgacgaaccagcggcaggtatttgtgagcacgctgatccagatggttcggcaccagtttcagggtgatataggtgatcatctgtgagccggactggcggcgctgtaaacggttggtcaccagataatccgcgaatttggtggcgcgccactcccagcggatcggctgtccggtatgatccagcacctggccgaacaggaacggctctttactgatggtgacatcgttggcatcagaatagaggtcaaccgagcccggatcctctcccatcagcagggtattgataatcgcctgacgcagatgcgcttccggctcaacccccgccagcgtctcaatagtgacggtaccggcatcaaagttgatatgggaacgggtgtagtactgatcggtgtatttgacgtaatctttcggaccggcgatcagaacttcttttataccccagatattttcaatgttatgggcaaactgacccatcagaatatcaaatccgttggtatccttaacatattcaggacggtaatccgtctgttcctgtgaaccggtacaggaagccagcagcggcgcaataatgatcagtgcagcaagttttttcatgggtataaatacggtgtgatccgggttcagatacaacatcagagccgggaaagggctctgatgacagggttatttttcaggcggtgtatagccttcaatgtggatatcgtggccttcaaacaggaatttgaccatctcctgttccagcagtttgcgatcatccgggttcatggtgctgagttttttctcgttgatcagcatggtctgtttggacatccactgctgccaggcttctttggaaatctcattaaaaatacgtttacctaattcgcccggatagagctgaaaatcctggccgtcagcctcacgctgaagaaaagtgcaaaaaattgttctgctcatgtaacatcctcaaaaatggggttctttacccgatctgcttaagcaaggtttccaccggggcggccaggccgatcgccggcggattttggctgttataccaaatcccgtcgctgtcgtcatggactgctgtgcgatcggtgacgtttacggcaacgggcacaatatccagatgaaaatggctgaatgtgtggcggaaggcaatcagctgctgtaatggtgagtggctgatgcggcgctgtgccagccagtcgtgcatggcgtcttccgttgcaaactgcggaaaactgtataatccgccccaaatcccttttgccgggcgcttttccagccagatctcattatcatgctgaatgataagaaagtaagctgttttttccggaattgattgtttcggttttttgccgggatacgccgccggattgtgctctgcatacccaatgcagccggactgcagcgggcacagctcgcacttgggtttgctgcgtgtgcagaccatcgcgcccagatccatcatcgcctgattaaaatactgcacaccgtcagccggggtcacatcttcggcgattgcccagagacggttttccacctcttttttaccgggccagccgctgacggcgtaacagcgcgccagcacccgtttgacattgccgtccagaatcgggaaatgctgattctgagagagggacagaatcgcgcctgcggttgagcgcccgacaccgggcagggcaaccacatcctcaaacgtgaccgggaactgtccgccgaattcagaagcgatagtctgcgcggctttatgcagattgcgggcacgggcgtaatagccgagcccggtccataaatgcagcacttcatcaagtggggcggcagccaggtctgtgactgccggaaaccgttcaataaaacggttaaaataaggaataaccgttgccacctgggtctgctgtaacatcacttcagagagccagacatggtaaggcgttttctcctgctgccagggcaggttttttctgccgtagcggtgataccacgtcagaaccgattgcgaaaattgctgtgcttccatgagaataaaataataattgaatagttttaattgacgggaattccagcacactgttttgcgactgtaaaccaacttttgcctgaaattgtgcgaaagaggatgattaaccggtgcgaagtcggttgtctcttgctaaacttgccgcactttgcgtgtgtcagcgcagcgcagcccgttgtgccggacacattatgatttatttttgccgggatactgacagcaaaccttatgatcaacaatgtaatttcgccggaatttaatgaagacggcagagccctgcgccgtgtccgcagttttgtgcgccgtcagggacggctgaccaaacgtcaggaagatgccctgacagacctgtggccgtcagcaggggtggattttaccccggaactgctggattttaccgcactgttcgggcgtgatgcaccggtcacactggagatcggtttcggcatgggcgcctctctggtggagatggcgaaacagaatccggataaaaactatctggggattgaagtgcatgctccgggtgtcggtgcatgtctggcggatgcgcaggaagccggggtgacgaacctgtgggtgatgtgccatgatgccatcgaagtgctggataaaatgatcccggataacagcctgcatatggtgcagctgttcttccctgatccgtggcataaggcccgtcacaataaacggcgcattgttcagctgccgtttgcggaaaaagtgcggacaaaactgacgcagggcggtatcttccatatggcgacagactggcagccgtatgcggagcacatgcttgaggtcatgactcaggcaccgggttaccgcaatctgtcagcaacacaggattatgtaccgcgcccggaaacccggccggtcacgaagtttgaaaaacgcggccatcgcttaggccatggcgtctgggatctgatgtttgagaggatgaaataatggcaacacaacgtagtcgtcgtttacggaaaaaaatgcgtatcgatgagttccgcgaactcggtttttccttcaaatgggacttcccggaaggcactgatgtcgacactatcgaccgcaccgttgaccagctggttgaggaagtgatcgagccgaacggcctggcgctggatgccagcggttacctgagctgggaagccatggtctgtttacagaaaatcggtgaatgtaccgatgagcaccgtaagctggtgggtgactggctgaaagccaaagggatgcagaacattcagatgtctgaactgttcgatatctggtgggactgagataaatttcttaccacgctaattattaataagggcacctgaaaaggtgcccttatctctctccggcctccggagttgtggcgtgccgtgttttggagtaacaaccttgaccacacactttagtaatgaactgctggacgatatcttacaccgtgtccggccgctgattggctccggtaaagtggcggattatattccggcgctggcggaagtctcacctgacaggctggggatcgcggtgtgtaccgtggacggggagatttttgccgccggtgatgcgtatcagcgcttttcggtgcagtccatttccaaagtgctgagtctgacacttgcgatgacgcgttataaggaatcggagatctggtcgcgggtcggcaaagagccgtccggtctgccgtttaactcactggtgctgctggagatggaaaagggtattccgcgtaatccctttattaatgccggggcgattattatcgcggatatgctgcagtcccgcctcagtgcaccgcgccagcggatgctggagtttgtccgcaaactgaccggcagtcaggatatcacctatgatttgcaggtggcgcgttctgaactggaacacggcagccgcaatgccgccattgctttcctgatgaaatccttcggcaattttgagaataatgtactgacggtgctggagaactattttcactattgcgcactctcaatgaactgtgctgaactggcaacctgttttgcttatctggccaacggcggcataccgctgggcggtcaggagcctgtgatcacgccgttacagtcacggcagataaatgccctgatgctgacctgcgggatgtatgacggttccggggaatttgcttaccggataggcatgcccggtaaatccggggtcggcggcgggatcgtctgtgtggtgccgggtgagttttctgtggtggtctggtctccggaactggatgattcagggaactctttggccggttgcgctgccttagaaatgttatccgcaaaaatcgggcgctctattttctgaacccgccgggttcagcgtccgctgtctgagaatcaggagtgtttatgttacgtaaatggattgccgttctgagtctgggtgccgcgtcactggcatcggcggaagggtatcagtgcagtgtcaccccgcaggatgatttggttatcacaccggcctatgtgcaggtgatcgggaaaagcggggaaatgaagatcacccctgacgggcagatcacccgcgacggcaaatccctgacactcagcgccgcacagagtgcggatgcaaaacgctaccagtcaggtgtgcgtcaggatgtgccgtggataaaacagcaggcggtaaaccggatcggtaaatcccgtcaggctgtggataaagtgctgatcaaagagatggggcaggacagcaaactgcgcggccatctgacaaccctggaagcggatctgaataaacaggttgatcggatcattgaaacccgtccggatggttatgccttccatcatcaggcgattaagcaggtggagcaggacggacgggcgcagatccagcagcgcctcggcggtatgcttcaggatgctatcaatgaaatcggccgcaaacagctgcttgccgggctgaccggtgacaaaagcgccgccggtgcggcactgagcgggctggacgggttacagaaatccttacagcaggccgtgcgtgaacaggaagatgattttaaacagttcagcaaacaggtgtgcggcaaagtcactaccctggaacaacagcgtattcagctgataaattcccttaagtaatataaggttaccggtacattctgtgccggtaactgcttttttaaccgatcaggttcaaataaatggtaattgttatgataatgattcttatttgattgacatgtttcggcttctgcctagaatgaactgcgacgttaaacgcatttaatcaggcaggaacatgaaaaagatcattccgttagtgttaattccgtttttaggctttgcctccgcttccgcgctggctgactccgcgccgaaatataccccgaatcatattgccgccgtggcggataaaagcccgctgctgaccatcgaacatcagtcgggctctgcgaaagtggcacaaaagccatcccgcgtggtgctgtttgactttggtgtgtacgacaccatgaataagctgggactggctgacaatgttgtcgcgctgccgctgggcaatctgccgtcatacctgaaaggtcaggtggacagcaaagtcgctgatgcaggcggaatgaaaacgccggacctggcaaaaattgcagaactgaagccggatctgattgtgatcaccggccgtcagggcaaatcatttgatgaactgaacaaaatcgcgccgacagtgaacctcggtaccggcggtgatgattatctggctgcggcagaggcgaatattactctgatcggtcagctttatgatattgagaagaaaaccgcagaagaactggccgcactgaataaaaccgttgctcaggctcaggaaaaagccgccaaatccggtaagaaagtgctggtgatgctgcataatgacggtaaattattcccgaataaacagccggttgtctatcaggtggtgaaagcggctgctgttgatattccggttgacccgaaagcagagaaagataaacgcccgctggtgactccggaaatggtggcagagctgaatccggatgtgattctggtgattgaccgcagcgcggcgattggtgcagggcagtgggataaagcggcttttgaaaccgatggtgtgaaaaagaccaatgcctttaaaaatgacaagattatcgtgttacagccggatctctggtatctctccggcggcgggctggacagtctgaaccgtcaggtgcaggccgtggaaagcgcgctgtaatccgctgattcagataaataataaaaacccggacgtgaaaacggccgggtcaggccgttgacaaacccgcaggggttggcgacgaccgccaggggttgtaaaaataaaccaggaaaatcaatttattgattttcggctgataacacaaagcaggaaaaaccacgttttatcctgctttgtcagcaatctcatccggacgtgaaagcggccgggtttttgttttataaaaaccgttccagcaacgtattgaggaataacttgccgtgttcggttatctgccagtgggttgcggtttcagaaatctcaccggcattcagtgccgcttcaatctgcggacgaaccacggattccggcagtccggtataatcggtgaaatcccggcgtggcatcgcttccagcaggcggaaccggttcataaagaactcaaacggccggtcttccgttgccacctcattttgctgatcaagataacgcccttccatataaccgcgcggatgtttggttttgactgtccgcagaatgcgtccgtcagcaaacgaaattttgccgtgcgcaccacagccgatcccgaggtaatccccgaaacgccagtagttgaggttatgctgacactgaaatcccggttttgcatacgcggaggtttcatactgcacataaccggcctgtgtcagtaactgatggccctgtgagaaaatatcccacagaagatcgtcatccggcagtaccggcgggcgggagccgaaactggtgttcggttcaatcgtcagctgataccaggaaagatgcggcggggcgagttcaatcgcctggcgcaggtcactgagcgcttcgccgagatgctgctccggcagcccgtgcatcaggtcgaggttaaaactgcgcagtccgagtgtcgccgcgagccgggcagcccgtttggcttctccggcatcgtgaatacgcccgaggcggatcagtttgtcatcaccgaagctctgcactccaatggaaatgcggttgataccggctttccggtagccgctgaaacgatcggcttccacagtgcccggattggcttccatggtcacttccgcatctgctgcgacaggaatacgggcacgtacgccgtccatcagtgtctgcatcgcttccgcactcagcaggctgggggtgccgccgccgataaagatagtgcggatttcgcgaccggcaaccagcggcagatcggcatccagatccgccagcagatgtgccacataatcatcatgcggcacttcacctttcagcgcgtgagagttgaaatcacagtaagggcacttctgaacacaccacgggatatgaatatacagactgagcgggggaagcttacccattacgcagggcttccgacagtagtgccagcgctttgccgcggtgagacatagcctgtttctcttccggacgcagctgcgcggcagttttattcagttcaggcagccagaagacaggatcataaccgaaaccgccttcgccctgcgcctgctctgcaatcacaccggcccagcggccgtggcagatgatcggtgtcgggtcattttcgtgacgcatatacaccagtacacagttgaagtgcgcctgacgctgcgccacaggtacgccgtcaagggcggccagcagttttacgatattggcgccgtcgttgccgtcagttccggcatagcgggcggagtagatccccggcgcaccgccgaggtaatcgacggaaatcccggagtcatccgcaatagccggtaaaccggttacttttgctgcgtgacgcgctttgataatggcattttcaacaaaggtcaggccggtttcctcaacggagccgactcccagttccgtctgtgccaccacatccataccggcatccgccagcagtgaggccatttcgcggacttttccggcattgccggtagctagaacaattttgcgggtcatatcagcgcctgattacataaatatccactgaacaatatcgttatagagatagcccagtgcatacagaataaaaatgacaatcattgcagagaaatcaataccgcccatcggcggaatgatacggcggaacggcgacatcagcggctcggtcagctgcatcagtacataatccaccgggttgcggccctggctgaaccagctcagcagcgcgcgggcgaggatcacccagaataccgtcatacctgcaagataaagaagattaaagaaagcgactaacagcatcagcccgccgagttgtccctgaaaaccggccagaaaccacggaaagagcagtttcagcagtacggcaacataggccaccagcacagaagccgtatcaatcgggccgatagccggaataatacggcgcagcggacggacaaccggctgtgtggctttcacgacaaactgggcaaacggattataaaagtccgcgcgcgcccattgcatccagacacgcagcagtaaaatcgtggcataggcatgcaggagcgtggtgacaacaaaattcagtgtttgcatcggtgaaatccttaacagaaaacaaattaaccggtttgtgataacgcactaaggtaccggaaggtcatgataccgaatgatcaggatacagaatagttacgcgcaccgaaaattgcagtgccgatgcgtaccatggtcgaaccgcaggtaattgcagcatccatatcgtcggtcatgcccatcgataacgtatccgcctgcgggtatttcccctgcagttcacggaaagccgtttccatctgacggaaaaccgcagactggcgctcaggatccgtttccggtgcaggtattgccatcagtccgcgcagacagacattcggcagtacggcaacctgctccgccagcgccggtaattccgcaagggtgataccggatttactgttctcatcactgatattgatctggataagtacattcagcggtgctttatctgccggacgctggtcactcaggcgctgggcgattttcagccggtcgatggtatgacaccagtcaaaatgctccgcaaccagacggcttttattagactgcagcgggccgataaagtgccattccagattttgattcgcagagaaatactgaattttttcaacgccttcctggacgtagttttcaccaaagcgggtttgtccggcagctatcgcttcttcgagcgcgctcacaggtttggttttactgacggcaagtaaggtcactgtgtgtggatcgcggccgcatttttgcgccgcagcggttatacgttctctgatttctgtcagattgtcttttattggtttcatgatgatccgggagataacctaatgaatatggataatttaatcgcccttagtgtaaagcataatgcatccgatctgcacctttgtgttggtcaggtgccggtgttacgggtggatggagagcttttttcgcagacacactgtgcggcggtaaccgatgacgcactgcgcggctgggtaaagacgatcctcgaccaggcaaattaccacagattgatgacaaaagggcaggcggatcttgcgttgtttatccgcgatcaacctttgcgggtgaatatttttatggcggggggattgctgaacgccgcactgcggctgataagccccgcagttccttctctggaggatatcttggcaccgccggtgtttgccgggctgctgtcaaaaacgcaaagcggcctgattctggtcaccggggcgaccggcagcggaaaatcaagcacgctggcggcgctgctcagttatatcaatcagcatttccggcggcatgtgattaccctcgaggacccggtggagttccgtcaccgcagcaggcagtcgctgatccgccagcgggaaatcggccgtgattgtgaggattatcagcaggggctgacagccgcgctgagacaggatccggatgtgattatgctgggggaattgcgggatgaggcggctatccggcttgccctgacggcggcggaaaccgggcatctggtgctgagtacgctccacaccagaggcgcgattgcggcgattgagcggctgacagatgtgttcagcggtgcggagaaaaaccgtgtgtgcagccagatggcaggcagtctggtggccgtgctgagccagcatctggtggctaaacagggcggcggacgctgtgcactgtttgatgtgctgatcaataccccggcggtggcgagccttatccgtgataataaagcgtatcagattgcctctcaccagcagtcaggcgcacagtccgggatgatgacggaggagcagtgcctgcaatggcggcgcggcagaggggagatagccggggaggcgggcgcggtaccggcatggtaaacagtacagcgcgccgggtgcgggatagtcagccgtaaagctgttcgaaccagctttcaaggataatcacggcagaggcggaatccactttgtctttgccgagagcgcggtagccgccgtctgcaaacagattggcgcgggcttccactgtgctgaggcgctcgtcatggagttcagcgcggatcccgaaacgcccgtgcaggcggttagcgaattttttcgcctgatttgtgaccagctgcggcgtgccgtccatattgagcggcaggccgacaaccacataatccggctgccattcacggaacacagcggcgatcagctcccagtcaggaattccctcacgggctttcagtgccgccagcgggcgggcggtgccggtgatggtctgaccgacagccacaccaatgcttttggtgccgaaatcaaaggcaatcacagtattgctgctcattatgcgtgtccggcctgttgtgcgatggtgtaaatattcacgccgataccggcggcagcttcgcgccagcggtcgggcatcggggtacggaacagcaggcgctcgctggcatccgccaccagccagctgttttccatgatttcccgctccagctgaccggccgtccagcttgagtaaccgagcgtcatcaggtagtgctccggttgctctgcggttcccagcgtttccagcacgtcttttgaggtggtcagaaacaggtcatcggtcaggcgggtactggcagcgtactttttatcaccggagtgcagaacaaagccgttctcttcggaaacgggaccgccgaccagaaccggtttttccagcgactgattttcatcacggatgtccggggagattttcagcttctgcagaattttaccgacagacagctgttcgatcggtttgttgatcaccagtcccatcgccccgttttcattgtgttcacacagatacacaactgaacgcgcaaaatacggatcatccagcgagggcatagcaatgagaatatgatgttgtaagttcataaccttcttttcagtctgcccgcagaccggaaaaaacagcctgcgggtgtgaatgtacagacacagcgccggctgttaccggccgagacgtttttcaatggcatccatcagcatgccggtgacagaaacatccggttgtgcggcttcaatttcgcgggcacaggtcgggctggttacgttgatttcagtcaggcggtcgccgattacatcgaggccgacaaaaatcagacctttttctttgaggaccggtgccacgctgcgggcaatggcccaatcgctctcactcagcggacgcacttcaccgtgaccaccggcagcgaggttaccgcgcgtttcgcctttggccggaatgcgcgccaggcagtaaggaaccggctcgccgtccaccaccaggatacgtttgtcaccgtctttgatggcaggcaggaagttttgcgccatgcagaaagtatgaccgtgatttgtcagggtttcgataatcacaccgacgttagggtcatcctgtttcagacggaaaatagacgcaccacccatgccgtcgagcggtttgaaaatcacatcaccgtgttttttgtggaactcacgcagacgctgtgcactgcgggtgaccagggtgtccggggtcagatcgggaaaccaggcggtgaacagtttttcgttacagtcgcgcaggctctgcggtttgttgacgatcagggaaccggcactttccgcacgctccaggatataggtggcgtaaatgaattcagtatcaaatggcggatctttgcgcatcagaatgacattcagtgtactcagcgcgatatcctgctcactgccgaactgataccagcctgccgggtcttctttcaccgtcagagtgcgggtacgggcacgggcaacgccctgatgcagataaaggtcattcatctccatataatggatttcataaccacggcgctgtgcttcgagcagcatcgcgaaactggtgtcttttttgattttgatggaatcgataggatccatcacaataccgagcttgatcattttttctccttaacccagatcgccgaaacgcacctgcaatgcggtgattgcagtgagcgcggtggtttctgtgcgtaatacacgcggccctaataatatgtcggtaaactgatgaccggcggtcatcgcgatttcctctgccgacagcccgccttccgggccaatcagcaatcgcactttagcggtttctgcgggcagtgtattgatactttgtgatgcacgcggatgtaaatttatcttcagggcatcatcattttccgcacaccatgcttccagactctgcaccgggcggatctccggaatcacgttgcggccgcactgctcgcaggcggcgatggcaattttctgccactgctgctgttttttgtccagccgttcaccgtccagtttaacaccacagcgttcagagatcaggggggtaataatctgaacacccagttcaacggatttctgaatggtgaattccattttttcgccgcgtgacatcacttgtccgagatggatggacagcggggattcgcggttgtcgtcctgctcatctgttacacggacggacacactttttttgctgatatccgtaatttcggcattaaaaatccggttggtgccgttaaacaggatcagggaatagccggttttcatccggagcacacgggcaacatggttggcgccgtcatctgtcagttcagtcaccaggccgggggttaaagtgccggggtgataaatgcgcgggatccgcatgaaaatatcctttacgttctgccggcacactgccggttgatacacattgccccatgataatagaggggggatcctcactgcaagcatcagccgggatcattacatgccggggtaactgtcaatattgcgtgatggatcgaaaaaaaatgtaattcggctgtaatcagggaaaaaaacgtgtctttcccgggacggtcaggcaggctgcggatatcgcaacagagaaaggcgcgggggaaacatggactggctgattatgattatctggggagtatttttgccgccgccgctgaaagccgggacggaatatattctgcgccattactatcagtatccgcagcggttaccgggcgggtggctgtatctgcactgcctgttatccggcgtgctgatagtgttctggtcagacgggcagggtgtgtatgtcctgtttctgacactgctgtttttgtgcttggtgatgctgtttcatattgataactcggtattttatctgccggataaactggtgtttccggtgctgtgggccggattgctgtttcagaatgaggtccggctggtgacgatctcttccgcgttgtacggggtgatcggcggtttttttctgctctggagtgtggcggaaggctatgcctggtgccggaaaaaaagcggcctgggcggcggggatatcaaactgttttctgcctccggtgcctgggtgggggcggaacagctcgcgctgttgctgatgctggcctgtgtgtccgcgctggtggtgtccgggctgcaatatttacgtcaccgctgtcatcatcacccgcgatgcggcccgcgcattattgccttcgggccgcatttaattgcggggatgattatggtgatgggaatgatatcaggcagtcgttttcagtaacgggatcagcctttcccagtgtgattccgcaccgagtacagcctggttcgggatgtgctgaaatgcgccgtcctcttccagcagcagggtcgggaagccgccggtcgggttatgcacaaataactgacggctctcatgaatatgctgctcagtattatcagactgaatatcactgatacccagtttatccgccagtctgcgcaaagtatcgcggttaagcggcagcccgtcctgataataggctttctggcaggcttccagcatgtcaatgcctttaccggactgcgcctgtgcactgagaatagcggcaatcggcggcacggaatccatcacccactcctgatttttcagcagggtgtaaaaggcatcggtaaacggttgtccggtcagctgagtgatgcgctgattgtggttgcggatcatctcccgcatgctgtcatctgccgggcggcgctgtgagccggtgatcattccgccgccgtgcagggcgatcgtcacgccctgcttatgtgctgcctgaataaacggcgcgataccataacaccagccgcagagcggatcataaatatagtgcagcgtttttactgacattctgttttccttaaatcagattactgcggccagcgcatttcgcctttgagcactttggcactcagttcgaggcttgactcatccgccagggccgggtaagcggctttcagtgtgctgatcatctgctgtgagtccttactctctttcagagcggtttccgcacgggtcagataatctgcggtaaaggtaatggcagccggtgaaaaatggctgttaccgacataatggccgggcaccacggtggccggatgtttgtcctgcatacttttcagcgactgctgccagtactgacgggattccggggtttgcgtatccgccagccagacatggatattctctgaaaccagcacaccgcccatcactgcggacagtgacggcacccatacataactgcgctccggcgccgggctgttcagtccctcaatcagaatactttccccttccagcataatgcggttgccctctaacggctccggcacaatgatactctgcggggcattctctttcagaacaggtccccagtaagccagtttgccgtctttactctctttaatcagtgcgacggtctgcggagtggcgacaatcttagcctgcgggaaggcttttttcagttcatccagaccgaaatagaaatccggatcagaatggctgatataaatggtggtcagcgttttgccggtcgcacggattttatccgccagtacctgagcatcatctttctgaaactgggcatcaatcagaaccacctcatttttgccgctgatgatttccgaggaaaccgggaagatacttttttcgccggggttatacacttccagcgacagcggtgcggcggcagtaacaaaagaagcccccatcagggcgctgaataccagtgaggtacggattgcagaagtcatggtgttatcctttttgcaggtgaatcgttaagatgacgctataataagttgcataatccgccggaaaaaccccataatccggtcttcattgttgcataaaccggacaaataaaatggacaggatcaccgccgctcaggtttttattgccattaccgaacagcgcagcatgagcaaagctgcggatatgctgggaatgtcccgcgcgatggtcacgcgctatctggccgaaatggaaaactgggccggtgtgcggttgctgaaccggacaacccgcagtctgacgctgacctccgccggtgaagcggtgctgacgcaaagccgggaattgctgtcactggcaacggcgattgcccgtccggtggtgacggaagatgaggcggtcagcggcctggtgcgtgtcacctgtgcccagtcactggcgatggtggcactgtcaaaggcacttgtgcagttccgggcccgctatccggctgttgctgtcgatgtgcaggtcacaaacaaggcgatcagcctggtggaggagcgcattgatctggggatccgcatcaccaacaatctcgaaccaaacctgatcgcgaagccgctttcccgttgtgattctgtggtctgtgcgtcaccggcctatctggaaaagcatgggtacccgccgtcacccgaagcactcagtgaactgacctgtctgacctataatttttacggccgcagtctgtggctgtttgaacgggatgaacaggtgatttctgtcccggtaagcggggcgctcagtgccaatgaatccacttttctgctggaagcaacgctgaacggggaaggtattgcattgcagccttactgttcggtgtatgaacatctgaaaaccgggcgactggtacgtctgtttcctgaataccggctgcctgcgctcggcatttatggcatttataccagccgcgagcatatggcgcggccgctgcgcctgctgctggattttctggcggagtggtttgcgcattcgccggactggctgccgtatctgctggatgaaaaaactaaccggtaacccgctttaactgccgcagaacggcctgcatatgctggcggagatgggtgataaaaatatctgtcagtacagaatgcggtctgtgcagcgggcggatcaggctcacggtgaacggaatatcctcactgaacgggcggacacaaattccgctgcaatccatggcagtcagcgggttaacgacagacacccccagcccctccctgaccatggcacataccgaggccgcactgtgtgtttccatgatcatccggcgcgggatctgcttttcactgaacaatgtatcgattttctgccggtaactgtccgcaacggacagactgataaaattctgctgcgcaaaatcagcaggggtcagtactgatttgctgcacagcggatgcgactccggcagcacacagacttcactgagcgtgagcagggtttcctgcagggtgccgggtggtgtcagctgatgttcggtgatcccgaggtcataacgctgggcggagagccactcttcaagaagcggtgattcctgcggggcgatttcaaaattcacatccggatactgcgcatgaaatgtgcggcagaccgcgggcagtaatgactgagcaaaggcgggcagacaggtgattgccagctgggcatgctgaaactggcggatgctctccgctgcccggctgatgcgctcaagcccgtaatatgatcgctccacttcctcaaataaccgcagcccctgttctgtcgggtgcaggcggcctttgatgcggtcgaaaacacggaacccgaggattttttcgaaacgggcaagctcccggctgaccgtcggctgtgaggtatgcagcagttgcgcggcatccgtcagactttttgttgtcataaccgcgtggaaaatatcaatgtgacgccaggagtagtgttccattattcatcaagtccatatcagtaatgaatagatcttagcaaatcagatattttaaatcgcgcagaatttttgtcacgatggaaaaaaatgagatcacgatcaaaaagagcacaacatcatgaccatcgcaaccaaaacactccgcgccccgtttaccccggatgccctgcgcagcctggctcagcagtacggtaccccgctgtggctgtatgacagtgaggtgattgtcagccgtattgcacggctgaaccactttgatgtgatccgttttgcgcagaaagccaattccaatattcatattctgcgcctgatgcatgagcatggtgtaaaagtggattctgtatctgccggggaaatcgaacgggcactgaaagccggttaccgtccggatgagatagtttttaccgccgatatgatcacagaagaaacgctggatcgtgtgctggaactcggcattgcggtgaataccggctcggtggatatgctgcgccagattggtgcccgtcgtccgggacatccggtgtggctgcgcattaatccggggtttggtcacggtcacagccagaaaaccaataccggcggcgagaacagcaaacacgggatctggtttgcggatctcggtgaagcactggcggagatcagccattatcagctgacattaaccggtatccatatgcatatcggttccggtgtggattatgagcacctggctacggtctgtgatgccatggccgaactggtgatcaccaataatctggatatccgcgcgatttctgccggcggcggattatcgaccccttaccgtgaaggggatgaaattattgatatcgataattatttttcactctgggatgccgcccgggcacgtattgcccgccatctcggccgtgagatcaccctggaaattgaaccgggtcgttatctggtggcggaatccggtattctgctggcacaggtgcgggcggtcaaaggtatggggagccgtcactatgtgctggtggacagtggttttaatgacctgatgcgtccggccatgtacggcagttatcaccatatttctgtgttaccggcagcgggagagctgcaaaacagcacagtgcgggaaacgattgtggccgggccgttatgtgaatccggggatgtgtttacccagctggaaggcggaatggtggtgccgcgtgcattaccggaagccggtgtgaatgattttctggtctttcacgataccggggcatacggtgcgtcgatgtcatcgaattacaacagccgtccgttattaccggaaatcttatttactgacggaaaggcaaaactgatccgccgtcgtcagacaattgatgaactgatggcgctggaaatcactgaataatatattatccgttattgtttctgactgatattgaaaatccccgggaataacatcccgtggattttatttttatactccccgggagtatattattgttatttattatcacataaagataacaatataataatgattattaacgcaataactgcatccggaggcggtatcccggcagagtgtgacagacgttataaaacagattacctgtcatagagtccccgcactgttacctctattatccctttagttactttattatttatcgccggtacagtttttatataacagtgccggtcagctttttccggggacgtgcgtattatgaatttaatgcagccatttgtatcagaaaaattaacacttaaaaataaattagtttatccgccggtcagaataaaacgcgctgctgacggctacgcgaattactttcatctggcgcattatatgtcttttgctgtcggtcaggttgggctgattattatggaagagtgcgctgttaccgctgacggtcgtctgggcagtggcgcgctgggtttatatgagggcgggcatgtcacgatgctggcgcagattgtggcgatgctgcaaaatgaaggcagcaaagtggcgattcagcttaatcatgcaggcagcaagtcacggctggaatccggcaatattattcaggatattaatgcattaaccgcagaagatattacggcattgtttgactgttatacacacgcggcggcacgggcagataaagccggttttgatgccgtggaaattatggcatcccatgaatttttaatttctcagtttattgatcggcggacaaatcagcgcagcgataaatatgccgatccggttattttcctgactgaattactgaccgcagtccgcaaatcctggccggaagataaagcggttattttacgtatcggcacccgttactgcgaagaagacagtatttcatttacacaaaaaattctgcgtaatattaatccgcttattgatattgtacatatatctaatggcggcagtcagatgcacggaacaaataaaggtgttgcttatcagctggaagataccaaaggggtaaaaaaaggctgtgaaaaaccggttattgttgtcggaggtattcgtgatcaccaactggctgatgagatattagaacatcagtatgcggatttaattgctgtcgggcgcgggttattacgcaatcctaactggtatctggaatatttactgaaatatgatcgtaaattaattccccgtccgtatatccgggcatttcgctgataacagtaaatacaatgacaggaagataacatggcaatatcagtcttaaaacgtattttcagtgccggtgtattactgctgtgtttcaattgtgccggggcaaaagaaatcaccgatctcaccggaaaccgggtcactattccggatacggtagagcggattgcggttgtgcctattccgtggatgtcgatgatttatgtggtggatggttcagatgcaaaaattgccgggatgcatccgtcagcaaaagaggcttaccgcaacagtattttaaaaacactggcgcccggaattgagaaggtgaacagcacttttgtgaataaagatttcacgattaacggtgaagagctggtcaggttaaacccggatctggtgattatctgggattaccagaaagaagaaaaagagaaactggataaactcggtatcccggcggtggcaatcagatacggtgatttggatgatgtgaaaaacgggatcaggttgctgggcgatattctgggcaaagaaaagcgggccgcagatttactggctttttttgatcatcagattgagtcagtgaacacggtgacaagagactcaactccggtgactattcgtgaaatgccgtacggaaagccgggcattttgtatgtcagagacaaaaacctgacggtggccggcaaaacctcggtaaacagcctgatgatcaaccgggccgggggcattaatctgacagatgatatgccggtgaaaccaaattggatcacggtatcggcagagcaggtggtcaacctggatcctgaaattattattctgagccagtttgattcattcgtgccggaagatgtgtaccggaatacggtcggctggcagggcgcagaaacgatttcagccgtgaagaacagacgtgtctataaagcccctatcggtatttaccgctgggatgcaccggggatcgaaacgccgctgatgatgaaatggattgaagcgcgggttaagcgtaaaccggcagatgatgcggcaatacagcaggatatccgtcagttctttaagcagttctttgataccgatctgacagacgcacaaatacgggaaatcctcagcctggatgccaatatgaccggtaacagcgatacaggacggtaatacagagcgcagtaatggcggagcagggaactgctccgccgtgttatttatgcgccgggattttcacctttgcggtaacggtgagaatgggcgtgtgattttaagccgataatctccggtgcaaactcatccacattaatcgagcgcagacggctggcttcggctttgcgcagaatatccgcttcttccggagtgacttttccgccctccagggcaatatctgccagtttatccagccgggtgaaatcaatgtgtttttcagccatgcggctcaggcgatccaccagcggttcggcggcgagaatatcactgagtgcagcattgagcagcccgtgcgggttgttgggatcaggtgccagatattgtccgcgtccgattctgtcgcgggtttctgacggttcctgcagcagacgggcgagtttgctgtccagtctgtctgacggcggacggtgatggcggcctgtcgggaagatggtcaggcgcagcagcgcagcgactttgcggtcagggaagttggtcagcagttcatccatcgctttttcagcctcatacaggcaatcctgtacagcccagtgcaccagcggtaagtctgcctgcggacggccatcctcatcaaagcgttttaaggtggcggatgccaggtaaagctggctgagtatatcgccgagtctggcggagatccgctcacggcgttttaagctgccgccgagtgtcgccatggcaatatcagacaacagtgccaggttggcgctcagccggttgaggtgctgataatagcggcgggtggcatcccggaacggtgacgggctgaaatgtccgcgtgaaagtccgagccagaaactgcgggtggcagcggttaacacatggccgacatgagcaaacagcgcgttatcgaagtcattcagctgattatccgccgctgcggccatctcagtcagtatgtacgggtgacagcggatagcgccctgaccaaagataatcatactgcgggtcagaatattggcaccttcgacagtaatcgcgataggcgcaccctgatagttgcgggccaggaagttggacggtccgaggcagatacctttaccccccgcaatatccatggcatcaataatggcgcgctgtccccggtgggtacagtggtatttcacaatcgcggacagaaccgccggtttttctcccagcataataccggtagtgatcagtgtggcggcggcatccatcagataggcatttccggcaatccgcgccagcggctcctcaatcccttccattttgccgatcggcattcggaactggcggcggatataagaataagcaccgattgccatggccgcacttttcagcccgccggtggcattggacggcagggtgataccacgcccgaccgacagacactccaccagcatgcgccagccctgtccggccatagccggcccgccgataatataatccagcggcacaaagacatctttgccgcgtgtcgggccgttctgaaacgggacattaagcgggaaatgacgggtgccggtttcaaccccgggggtatttaccgggatgagtgcgcaggtgatcccgagcgaggctttttcaccgagcagtttgtccgggtcatacagtttaaaggcgagacccagtactgtggcgaccggtgccagggtgatatagcgtttattccagttcaggcgcatgccgagcacctgttcaccctgccattcgccggtgcagataatcccggtatccggaatggcaccggcatctgaaccggcttccgggctggtcagggcaaagcaggggatttcctccccggaggccagtcccggcagccagcgttttttctgctcatcagtgccgtagtgctgtaacagctctcccggccccagtgagttaggaacgccgacggtaatcgccagaataccggaaactccggcgagtttttgcagcacccgcgcctgggcataggcggagaacgccaggccgccatattctttgcggatgatcatggcgaagaatttatgctcgcgcaggaactgccatagctccggcggcagatctgccagttcgtgggtaatttcaaaatcattggccatccggcaggcttcttctgccgggccgtcgaggaaagcctgttcttctgctgtcagttgcggggcaggatagctgtgcagtttctgccagtccggctgcccgcgaaataaatcaccttcccaccaggtggtacccgcatcgatcgcctctttttctgtctgcgacatcggcggcattactttgcggaacagcagcatcagacggctgctgaacagtgcctgacggacgggggtgataacaaacggcagggtaaccagcaccagtaaaacggtgacagtaaacggccataaacggaagatattcatgacgatactgaacagtaccagtgtcattgcactgtacttcaggctgacccggtgaaatgagagcaacccggtgacggcgataaacagaataatgctgattagtaacatgatgaacctccgtaggcggatattcgtgtcagcacaatatgatgtcatcagaggtctgacctgttatgttcagatttagcgcaacggcggaataacttcaatgatttcacattttatttacaactcagctcacaaaattagcaaaataaaatccggctattgacaaacccgcaggggttggcgacgaccgacagaggttgtaaaaataaaccaggaaaaaccacgttttatccttctttgtcagcaatctcaatgtgtcttatttgcagataccacggattgtgacttctttcaccccggcagatccgttacactcaggacagacaaatccgattcattttcaggagcctatctctatgtaccaggaacttatccgcggtgaactgaccgaagcagcggcaaccctcgataactttttgaaagatgagaataatatcgatgctatccgccgggctgctgtcatgctggctgattcttttaaagcgggcggcaaagtgatgtcatgcggcaacggcggttcacactgcgatgcgatgcattttgcggaagaactgaccgggcgctaccgtgaaaaccgtccgggctatccggcgattgccatttcagatgtcagccacttatcctgcgtcagcaatgattttggctatgaatatgttttctcccgttttgtggaatctgtcggccgtgaaggggatgtgttactcggtatctccacatccggtaattcaggcaacattattaaagccattgaagcagcccgcgccaaaggcatgaaagtgatcacgctgaccggcaaagacggcggtaagatggcaggcagcgcggatattgaaatctgtgttccgcactttggttatgcggatcgcattcaggaaatccatattaaggttattcatattctgatcatgctgatcgaaaaagaaatggccaaataaccggatataagccggatcctgaaaaagcactctgccgccggttgagtgcttttttatggcgtaatgcctgtcttattcaccataagcataaatcaccttacatataactaaatcatctaaaagaatgatattttcgcgattgtgaaactatcagattgcgggtaacaatagtcctcagtcatcacaaaaacgggtaagggagaaaggcgatgtgtgaattgctggggatgagtgcgaatgtcccgactgatattcatttcagtctcagtggcctgatcccgcgcggcggcgaaaccgggccgcataaagacgggtggggaattacgttttatgaaggaatgggctgccggacattcaaagacgcccgtgcctgctgcaactcccccgttgcccgttttgtccgtgactatcctgtcaaatccgaagcggtgatcgcccatatccgccaggcaaacagaggggtggtatcactggaaaatacccacccttttacccgcgaactgtgggggcggaactggacatatgcccataacgggcagctcagcggctatgagcatctgccgaccggtttttttaccccggtcggccagactgacagcgagcatgcattctgctggctgctgaatcagctgaaagaaaaatacccgcagccgccgcaggatctgcagacagtattccgtgaaattaaacggctggcggatgtgctgcggcagtttggtgtctttaatatgctgctgtcagacggcagctatgtgctggcgtactgttcaacgaatctgcactggatcacccgccgcgcaccttttggtaaggcgcggttggtggacagtgatgtggagattgatttctcacagcatacccggccggatgatgtggtgtctgtgattgccacgcaaccgctgaccggcaatgaacagtggcagaaaatcgggcccggcgaagccgttctcttttattacggcgaacgggatgagtccgtgttctgagtcagcaaaccggtatccgctgccggtgccggtaaagctgaatgtgcagcggttacataacggccgttaacaaccgcaacgactgccggtatctgattttcagcgaaatactgataagcaggctgcaactgctgccagaacgccagatgtgcggagttccggtggcggttcaggttctcaggcgtcatccggaaagggtaaatcgcgatattcagatctgtctgtccgctcagcagggcgctttccacatagcggtaaatctcatcaatataagcatctgtcatggcgtagcagccgacggatttgcagtcaccgtgaaccatcagataatccccggtatagccgtgcgcacggtcgaattcattgggaaaaccaaggttgatagctcggtaaaaccgactgttcgggttaagctgtgacagactgatgcggtaaaatccttccgggctttttaaatcaccggtcagttgctttggtccgaggccgccggaaaactgacaaaccgggtagcgttttaccagtttaaaacgtccgttattttcccgcttataaagctccagctctttttcttctttaaatatctgtatgaatacctggctgttccggacatcactcaccggcgctgtgagccataatgacgcggatttttccgtgtttgctgatgattgtcccgcaaaaaacagcaggccgatcatcataaaaatgatatgtcgcattcttaatattcagggtggcaataggttggtgaaaaaagtaacaacagattgccatgatgcagataatttgtgaatggtttcctgtgagaataaaatcggttgttacaaatattgttgtggttaaaaaataaacagcaatcggtaaagatgacttaactactcggtaaaggcgagttattaggctttttctgatcacaataatcccatttgcttgaacccggtcactcgtttcgccggacagaattgttgtgaagtggtaaaataatgcggatctgatttacgcaaaatcgtgacatacatcagagaaaacagcccggggcgacaataacggcccggagtgtttttattgttgagttgtcatacgctgctgcggcagtgatgacgtgggtttaacaaaaacttgtgcaaattttatgattaaaattaaaaaaggactcgacctgccgatcgcaggagcacctgctcaagtcacagaagatggcccttcagtccgccacgcagcattgctgggtgaggaatacatcgggatgcgtccgtcgatgctggttcaggaaggtgaatcagtgaagaaaggacaggctctttttgaagacaaaaagaaccccggtgtgatttttaccagccccgcctgcggagtggtaaaagccatcaatcgtggtgagcgtcgtgtattacaatctgtggtgattgagatacagggagacgagcaattaacatttgacagttatgaccgccgggatctgccgtcactgacccgtgaacaggcagagaaaaacctggtggcctccggattatggaccgcgctgcggacacgtccgttcagtcataccccaaaattaggctctgtgccggctgctatttttgtcactgctatggacaccaatccgctggcggctgatccgctggtgattatccgtcaggaacaggcgtcatttgatgacggcttacaggtactgagctgcctgacggaagggaaggttcatgtttgtcacggtacagatgacttcgcaaaagttaccgataacaatcgtgttagttacacgcagtttaccgggccgcatccggcaggccttgccggtacgcacatccacttcctggaaccggtcagcgcaacgaaaaccgtctggtctctgaattaccaggatgtcatcgccatcggtaaactgttcacgaccggctttttatataccgaccgtattgtggcgctcggtggcccgcaggtggaaaatccgcgtctgctgaaaacccgcctcggcgcagatctgtatgaactgaccgaagggcagttgaaagccggtgaaaaccgcattatttccggttcggtcctgtggggcgtggccagtgatgatgctcatcactatctgggccgttttaccaatcaggtctctgttctggaagaaggccgggagaaagagctgttcggctggattatgccgggcacagacaaatacacggttacccgcaccacactgggtcatttctttaagaaaaaactgttctcattcaccacatcaatgaatggtggcgaacgttctatggtgccaatcggcagttatgaacgtgtgatgccgctcgacattatggcgacacatttcctgcgcgatctgctggcgggtgatactgacagtgcccaggcactgggtgcgctggagctggatgaggaagatctggggctgtgtacctatgtctgtcagagtaaatatgagtacggcccggtgctgcgtgacgtactgaccaggattgagcaggaaggataatcatgggtctgaaaaaatttctcgaaaaaattgagccgcattttgaaccgggcggcaaattacagaggtggtatgcactgtatgaagcagccgccaccatcttctataccccggggacagttacccgcgggcgttcacatgtccgtgactccatcgaccttaaacgtctgatgatcctggtctggttatccgttttcccggccatgttctgggggatgtataacgtcggtaaccaggcaatgccggtactgctggatatgtacagcggtgcggagcttcagcaggtgattgccggtgactggcattatcgtctggcggagcttatcggggtgtccttcactcaggatgcgggctgggtcagcaaaatgctgttcggtgccgtctatttcctgccgatctacggggtgatttttatcgtcggcggcttctgggaagttctgtttgcgatgatccgcgggcatgaaatcaacgaaggtttctttatcacctccattctgctggcactgattgttccgccgacgctgccgttatggcaggccgcgctggctgtcaccttcggtgtggtggtcgcaaaggaaattttcggtggtacaggacgcaacttcctgaacccggcactggccggccgtgctttcctgttctttgcttatccggctcagatttccggtgataccgtctggactgccgctgacggcttctccggcgcaaccccgctgtcacagtgggcggtcggtggcgagcatcagctcgttaataccatgaccaatcagccgatctcctggatggatgcctttatcggtaacgtgccgggctcgattggtgaagtctccacgctgatgattctgatcggtggtgcagtcattctgtttgcccgtattgcgtctttgcgtattgtggccggtgtgatggtcgggatgatcgcaatgtccgccgtctttaatatgattggttcggacaccaacccgctgtttgctatgccgtggtactggcatctggtcctgggcggttttgccttcggtatgattttcatggcgacggacccggtttcagcctcatttaccgacaaagggaaatgggcttacgggatcctgatcggggtgatgtgtgtcctgatccgtgtggcaaacccggcatatccggaagggatgatgctggctatcctgttcgccaacttattcgccccgttatttgattatctggtggttcaggcaaacattaaacggagaaaagcacgtggctaatgaaaaaacgaaaaacaaggacagtgtcgcaagaacgtttatcgttgtcttcgtcctttgccttgtgtgttcaatagtcgtggccggttctgctgtggggctgaagtccacgcagcagaaccagattatgctggataagcagcgtaacattctggatgtggccgggttactgacgccatccatgccggcagacgaaatcgatgctgtctataaaaaattcatcagagcaaaaatggtggatttaaaaaccggtcagatgagcgacagcaccggcaagtacgatctcaacgatgaactgcgcagtgatgagagcagtattgccctgtcaccggaagaagatctggcgaaaatccgccgccgtgccaacagcgcggaaatctatctggtacagaatgagcagggtgaaaccagcaagattgttctgccggtttacggctccggtctgtggtcggtgatgtatgcctttatcgcgattgatgtcgacggtatcacctccgaggggatcacttactaccagcacggtgaaacgccggggctgggcggtgaggtggataacccgcaatggcgtaaacagtggattggtaaaaagctgtttaatgaagaaggtatgccggctatcaaaatagtccgcagcggcgccactgacagcccgtacggcattgatggtttatccggtgcgacactgacctcaaacggtatccagcatatgtttgatttctggctgggcgacaacggttttggcccgttcctgaaaacagtacgcgaaggagcgttgaatcatggctgatagtaaagaaattaaacgcgttcttctcggaccgttattagataacaacccgattgccctccaggtactgggtgtgtgttcggcgctggctgtgaccaccaaactggaaactgcactggttatgaccatcgcggtaaccctggtgacggcattctccagcatgtttatctcgatgatccgtaactttattccgggcagtgtgcggattatcgttcagatggcaattatcgcctcgctggttattcttgttgatcagatcctgagggcctatgcctacggtatctccaagcagctttccgtgttcgtcggcctgatcattaccaactgtattgtgatgggacgtgcggaagcgtatgccatgaaagcaccaccgcttgaaagctttatggacggtatcggtaacggcctgggttacggtgtgatcctgctgctggtgggcttcttccgcgaactgatcggctccggcaaactctttggtgtgaccgtgctggagacagtacagaacggtggctggtatctgccgaacggcctgttcctgctggcaccaagtgcattctttatcatcgggatgcttatctgggggatccgtaccctgaaaccgtcacaagtcgaggaggattaagatatggaacattatatcagtctctttgtgcgggctgtgtttattgaaaacatggcactggccttcttcctcgggatgtgtacgttcctggcggtgtcgaaaaacgtcaaaacggcgtttggtctcggcgtggcggttaccgtggtgctggggatttcggttccggcaaacaacctggtgtacaacctgctgctgcgcgacggcgcactgatggaaggtgtggatttaagcttcctgaatttcattacctttatcggggtcattgcggcgctggtacagattctggagatgattctggatcgctacttcccggcactgtataacgcgctggggatcttcttgccgttaatcaccgtaaactgtgcgattttcggtggtgtgtcctttatggcgcagcgcgactacaactttacggagtctgtggtttacgggttcgcttccggtatcggctggctgctggcgatcgtgctgatggccgctatccgcgagaagatgaaatactctgacgtaccggccggcctgaaagggctggggatcacattcgtgaccaccggactgatggctctgggctttatgtccttctccggcgtacagttataagggtgaaacgcaattatggatatcgttattttaggcgtggcaatgtttaccctgattgttctggcgctgaccgcgttgattttgtttgcaaaatcaaaactggtgaacacaggggacgttaagattgaaatcaacggcgatgcggagaaaagcttcgacgcaccggccggtgacaagttactgaatgtgctgtccggtcaggggatttttgtctcctcggcctgcggcggcggcggaacctgcggccagtgccgcgtgaagatcaaagaaggcggcggtgatattctgccgacagaaatgtctcacattaataaacgcgaagcccgtgaaggctgccgtctggcgtgccaggtgaatgtgaagcaggatctgaaaattgagctgccggaagagatcttcggggtgaaaaaatgggagtgcgaagttatctccaatgataacaaagcgactttcattaaagagctgaaactgaaaattcctgatggcgaaagtgtgccgttccgtgccggtggttatattcagattgaatgtccgccgcatgtggtccgctatgatgagtttgatgtgccgcaggaataccgcgaggactgggacaagttcaacctgttccgctatgtgtctgatgtgaaagagccgacagtgcgtgcttactctatggcgaactatccggaagagcacggcattatcatgctgaacgtgcgtatcgccacaccgcctccgcgtgtgccggatgcgcctccggggattatgtcctcttacatctggtcactgaaaccgggtgataaagtgacaatttccgggccgttcggggagttcttcgcgaaagataccgacgcggaaatgatctttattggtggtggtgcggggatggcgccgatgcgttcgcatatcttcgatcagctcaagcgtctgcactccaaacgtaagatgtctttctggtatggtgcgcgttcaaaacgtgaaatgttctatgaggaagattttgaccagcttcaggttgagaatgaaaacttcacctggaacgtggcgttgtctgatgccctgccggaagataactgggacggatacaccgggtttattcataatgttctctatgagcattacctgaaaaatcacccggcaccggaagattgtgagttctacatgtgcgggccgccgatgatgaacgccgccgtgatcaagatgctcaaagatctgggtgtggaagacgagaacattatgctggatgacttcggcggctgatttccgcccctgtcataacgaaactgcgcccacacctgtgggcgcagatgatctgaaatcagactggattgtatatggtaaaaataaaacgggctttcctgccgctggcactgatggcattgttactgagcgcgtgcggtgataacactccggaaacacagcaggtaaccctgaacggcaaaacgatgggcacctattacgcgataaaatatgtcgctgacccgaaaggcccgtcggcggaatcactgcagaaaggcattgatgtggtgctggaagaggtcaatgaccagatgtccacctaccggccggattctgaactcagccgttttaatcagagccgtgaggtgaatacgccgtttccggtctctgccgcgactgcaaaagtggttcgtgaggctatccgtattaatcagctgacagacggcgcactggatgtcaccgtcggcccgctggtcaatttatggggatttggtccggaagggcgcgtgacccatgtgccgacagagcaggatatcgaaacccgccgtcagtggaccggaattgataaactgaaggttgaaggtaataatctgattaagacagtgccggaactgtatgtggatctgtcctcgattgccaaaggctacggggtggatgcggtggcagaatacctggaatcacagaatatccgtaattatatggtggatgtgggcggcgaagtccggacacagggcattaacggcaaaggcaaaccgtggcgcattgcgattgaaaaaccgtcgtcacaggggctgagccagtctgcacaggaaatcattgagccggggaatgcctctgtggcgacatccggggattaccggaattattttgaagagaataatgtccgttattcacataccattgatccgaaaacagcacgtccgattaaccataatctggtatcgattacggtgattgctgataattgcatgagtgcggatggcttttctaccggactgaatgtgctcgggccggagcgcgggcttgaagtggcgaatgcgcaaaatatccctgtttttatgattgtcaaaacagagaagggatttgaagaacgctacagtgaggcatttaagccctatttgcagcaaaaataaaaggaggtggctgatatgatgataaaagtatttatcgcaacctttatcctgtttctggtcgcgtttctgggaatgtctctcgggtatattattaagcgcaagagcattcagggaagctgcggcgggctgagcagcattggtgtcgagaaagtctgtgactgtcctgaaccgtgtgatgcccggaaaaaacgaatggcacgtgaagctgcccgcgaagagaaactgaataaaaaccggattgtatagattcggaagatataacaaaggcgccttaaagcgcctttgtttattaatggcaggacaacaatacggaatcagtaataacgatagtctgatgtcacaatagcggtatttatcacaataatattattggcctgattcccttcagagatactctgccagagtgctttttcacaattcccgtaagtatctgtctgctggcagatataaatagcttttacccggcccagcggcgtatgttgtgtctgtgtctgccggataacctgaccatcatcattatacgcaaattcatagttcagctgaggaagcccgttactttgggacataatcgcatttatctgccgatcctgacgccagtcgtagcggatttcaccgccggtgtccgcggaatcccctgtggataccgcatgtgagattaaactgttttcataaaaaaaatcggtttccatatgcgatttttgggtattgccgccactgttactttcagattcggcacggacgatttgcttctgattattatagaaaaggcggcttcgggcatgaatcagcgtgacgggtgcttttccgctgccatgtagttgtgacgtgaataataaggtatatccctgttccgtcttctttccttcggaatacatccggttttgcaaccccgggtagtgctcggtaacttccagcgaaaagtaactcagttcaccacacggcgtcaggtcatattgcccgttaatcataatattgctgtttttgttgtccggggaatgtgctgttgtgatgacggattttaccgggccgttgatcataccggcacccagaataataaagttactgctgcgtgtctcatctgaatacaaactgcagtctgcgtaagaataaacactgaataacagaaaaaataatcccgtaaaaacaaagagggattttggtggtgaatttaaatcgaagaacaggttacttatcaccgcatagcctcccggatgtttcttatagttataacaaaagtggcctgataaataaattactataattaattaggtttgctgagattataaaatattatgtaaggattacagagtaaatggcaggaagagacagaatgtattaaataagagtgatattcatcatctgttaaatctcactcttatttttcaggcgggtaaaattaccaagtaataataccttgattaattattttattttcatattgagcagcgaatcgaccatcacgccatctgcacccaattctgtcgccagttgtaaatcggcgggtgtttttataccgaacagaacaacatggttttgattatttttacgaaaacaatccattgcggttttatcccaggtcagcacaaccggagagcgtgcttcacccaatgtgaaggtttcaaccacatccacgttacggtgcagttcaaagccataccagcgcggctgcggattatctgccaggtcacaggtgtgtgtgatcaggctgccggccagtgcattacgggtggtatcacggctttcaaaaacggggattgacggcggcagggcagccagataatcctgatcggttgaatagacgcggacacggtttttggcgttatgacgggtcagtactgaatccagctgttgtgcaaaaaccgccggtgaggcgtccggagatttgatatcgaggtagaaaaaagtatccgggtaacggctcaggacggcatccagtgccggaacagaagccttgatatgggttttatttttctgattataatcccgggctgcatcggtttgtgccagttctgcggcgctgtaaccggaaaccggaccggttttgtcggtcagggatttcagatcagacgggcggtataacaccacctggttgtcctttgagagctgaagggtgatccagatggcatcggctttgttactcagcgccttatcgatggcataaagggtattctcaggggcgtccgccgtggcggcgcgatgggcaataatctgcggtgctgcatgggctgtcataacaatgccactcaggaaaagggctgatagtatttttttcataatccgtccgtcaaaaagaatgagaccaggtgtgatgtcacgctgttgtagcggagtaacatgacaaccggatgtaatcacagaaaaaaagtacaaacctgcaaatttcagcccactgattgatttggtgaataataagcaaattaaccgatttgaattgcattgattttaactgtatatttaaacagtgttattggtgagcaggagaggcggatgcgtaaaataattcatattgatatggattgcttttatgcggcgattgaaatgcgtgacgatccccgtctgcgcgatatcccgctggctatcggcggcagttccgaccggcgtggtgtgattgcgaccgccaattatccggcgcggcgcttcggggtgcacagcgcgatgtcaacggcaaaagcactgctgctgtgtccgcatctgaaagtgatccctgggcggatggagctgtataaaaccacctcccgccacctgcatgcgattttcgcccgttatacttcactgattgagccgctgtcactggatgaagcttatcttgatgtgacggacagcccgcagtgccggggttcagccacactgatggcggaagagatccgcaaaaccatttttaccgagctggggctgaccgcatctgccggtgtggcaccggtgaaattccttgccaaaattgcgtctgatctgaataaacccgacgggcagtacattatcacgccggagcaggtgacggattttgtgttgtcactgccactgcgtaaaattcccggtgtgggaaaggtgacagcaaagcgactggctgatctcggtctggagacctgccgggatgtgcagaattatgatcagatatcgctgctgaaacagttcggaaagttcgggcagatcatctggcagcgcagtcacggtagcgatgagcggccggtttgtccggacagggaacggaaatctgtcggtgtcgagcggacactggcggaagatattgcctcgtgggatgagtgtcagacgattattgatgagctgtttccggagctggagcgtcgtctgacaaaggtgtcaccggatctgcggatcgcccgtcagggcattaaactgaagtttgcggactttcagcagaccacacaggaacatgtccatcaggtgctggataaagcggatttgctgaaaacggcggaactggcctgggagagccgccgggaagggcgcggcgtacggctggtggggctgcatgtaacactgcgggatccgcagcttgagcggcagttgctgctcgggttctgaatcacatataaaaacggcgggataattatcccgccgctgagctgaataaggcgattacgctttttcagggatcgcttttaagatagcggtcagtaactgccagtactgcccgacactcttgatatgtacttgttcatcaggggagtgcgctccggtgatggtcggcccgatggagaccatgtccatgtccggatacggttttttgaataaaccgcactcaagaccggcgtggatcaccatgatgttcggggttttgtcaaacagctgctgataggtttcgctgaccagatgcatgaccggagagtctgcatccggctgccagcccggatagccgccttcggcaacaatatccgcaccggacagtgccgccagcgaggtcagcatgctgaccacggaggatttgccggattcaatcagggaacgtaccaggcagataatctgcacacggtcgtcactcattttcaccacacccacgttcagtgaggtttcgaccacgcccggaaccacgtcactcatgcggatcacgccgttcggcatcacattgagcatattgataaagcgggactgcacatcagcggtcagagcgccctgagcagcggttgcagcttccagggtgacaaccaggtttttctctttctgcgcgagctcttctctgagcagcgcttcaaaggtctgtgccagcgatttcagctgtgcggctttatctgccggtactgccagagtgatgtggccttcgcgcggaatcgcgttgcgcagtgtgccgccctgaaaatcaaccagacgcgcgccgagttctgtggcgtgaccggccaggaaacgggccagtaatttgttggcattgccgaggcccagatgaatatcgccgccggagtggccgcctttgagacctttgagggtcagggtgaaggtgctgtaaccggccggaacggcttcacggctcagtgagagtgttgtggtgacgtcaataccgcccgcacaacccatatagatttcaccttcttcttcggagtcggtattgatcaggatatcagcctgtaaccagcccggctgcagaccgaatgcgccgtccatcccggcttcttctgtcatggtcagcagaacttccagcggcccgtgtttgactgaatcgtcagccagtactgccagcgcggaggccataccgatgccgttatccgcacctaatgtggtgcctttcgcggttacccagtcgccgtcgatgtacggctgaatcggatctttttcgaaatcgtgtgctgtatcattatttttctgcggcaccatatccaggtgcgcctgcagaacgaccgctttgcggttttccaggcctttgctggccggtttgcggatcaggatattaccgacgctgtcgcgttcaacgtggaattccttttcttttgcccattcaataatatgtgcagccagttgctcttcgtggtaggacggatgaggaatagagcagattttggcaaaaatatcccacagcggctgcggaaataattgtgatagttcagacacgttcgatctcctgttactgcatttttcattattagggggaggatacccgaaggcggccggtaacgctgtttaaaatgagcggtcgcgaatatccgatgtccggagaatagcaaattcttacgcaaagtgcgtgtgtcataacagggaattatgatgaatttgtcagatactctggtctttggcggctcaagtcactataatctcgcgcaaccttttttccgcaaaaaagactcttttctgtaaataatcaagccgggatcaatctgatatgagcgaaaaatacgtcgtaacgtgggatatgttgcaaatgcatgcccgtaaactggcacagcgtttaatgccaaccgaacaatggaaaggcatcatcgccgtaagccgcggtggtctggtgccgggtgccttactcgctcgtgaactgggtatccgtcatgtggatactgtctgcatttccagctatgatcatgaccatcagcgcgatatgaaagtcctgaaaaaagccgaaggtgacggcgaaggatttatcattgttgatgatctggtggacaccggcggtactgctcagatgatccgcgatatgtatccgaaagcgcatttcgtcactatttttgccaaaccggccggacgtccgctggttgacgattatgtggttgatatcccgcaggatacctggatcgaacagccgtgggatatgaccgtcagttttgttaaaccaatctgcgatcagtaagcgaatgccatgacacaacagaacctgtcagagaaactgtttaagccgaaaatcaagcaccctgagacatccgcactggtgaactttacccgttccgggatgaaggaagtcaggggcagcgtcctgagcggatgtacccatccgggctggtatcgcatgattaaccgcttaatgtgggcctggcgggggatcccgccgctggaaaccgaagaggttctcagccggatcgcggcatctgatgccccccgcagtgatgatgcactgctggatacggtgatcggctaccgccgcggtaactgggcttatgaatggtctcagcaggcgatgttgtggcagcgcaaagcgctggaatttgaatccggcgaaaaagcctgtgaagcctggctgcttgccgcaaatctgtacagtattgcgggatatccccatttaaaaggggatgagctggcggatcaggctaccgttctggcaaatcaggcgtatgaaaactccgcccggtttgccgcatatgaactgaaaaaaattgaattcaaaatggagagcggcggaaacatctgcgctttcctgcacctcccgccggggaaaggcagtgcgtttccggtggtgatgatgtgcggcagtctggataatctgcaaagtgattactgccgctacttccgtgactatctggcaccgcagggcattgcactgctgacgctggatatgccgtcaatcggttactcttcaaaacagactttaggccaggaaagcagcctgatgcaccagcaggtactggatcagctgcgcaatgtgccgtggattgaccacacccgtgtggcggtgatggggctgcgtttcggtgccaatgtggcgatgcgtatggcatacctgtccgcacatcagctgcggggggccgtgctgttcgggccggtggtgcatgatctgtttgtcagcccggagcggcaggataaaattcccggcatgtatatggatgtgctggccagccgtgcggcggcgcgctgtactgaccttgatactgtccgcacccggctcggttgcttatctctgaaaaatcagggactgctcggccgccgctgttcactgccggtgctgagcatgtgctggaaagaggatgtgttcagcccgaaaagtgaatcggagctgattgtccgctccagcgctgacggtaagctggtggaattcggccatacgccggtttttgacactttccacaaatcgctggatgaggccacccgctggctcaccagaattttatcctgaacagcataataatcattgataattcctgtctgtttgctacaactaagccttcgctgaaaggaggcttaatgatggcactggtttcagattacacacgcggcaggttgctgcgatgtttcactgcattgggtccgtatatccgtgagccgcagtgtcaggaggggcactatttttttgactgcctggcggtgtgtgtgaatgcgggggtcgcgccggaaaaacgtgagttttttggctggtggctgacactgatcccgcaggaaaccgggtttgtctcagaataccataccggggtatttgataaaaaagggctctggcaggaaaaatccctgtctgacaaagagatccgtgatgcggtcagcaaaaccctgactgatttttatccccgcttacaggccgttcttcaggaactggatctgtccctgaccccgtcaccggtatcaccgccccccggaaagcagccggattaatgtccggttttgcgttgtgcctgttggcatggcgcgcatcacctgttaaaacaggtcatcttttcttatcccgcaaaatgaatggtagaacgcaatgaatagcagccaaacgctggttgtcaaactgggcacaagtgtgctgaccggcggatcacgacatttaaatcaggccaggattgttgaactggtccggcagtgtgcgcagcagtatgcaaaagggcaccgtattattattgtgacttccggggcgattgccgccggtcgtgaacacctcggttaccccgaactccccgccaccattgcgtccaaacagctgctggcggccgttggccagagccgcctgatccagttatgggagcgcctgttctcgatttacggcattcatatcggccagatgctgctgacccgcgcggatatggaagatcgcgagcgtttcctgaatgcccgtgacaccctgaccgcactgctggataacggcattgtgccggtcatcaatgaaaatgatgcggtcgccacagcagaaattaaagtcggagataacgataatctctccgcgctggcagcgatcctcggcggggcggataagctcctgctgctgactgatattgaagggctgtatactgccgatccgcgcagcaacccggacgccaccctgatttctgaagtgcatgacatcagcgatgaactgcgcagtgttgcaggagacagtgtctccgggctgggcaccggcggaatggccaccaagctccaggccgcgacggtcgcaggacgtgcgggaattgatgtcattattgctgccggcgatcgcgccggggtgatttgtgatgtgattgatgatattccggtcggcacccggttcttcgggaaaaaagcgccgatggaagcgcgtaagcagtggatcttcggggcaccgcctgccggcgagatcattgtggatgacggtgcggagaaagcactgaaagataagggcagttccctgttgccgagcgggatccgcactgtgaacggcaatttctcccgtggtgaggttgtccgcatccgcgcgctgaacgggcgggatctggcacacggtgtctgccggtataacagcgatgcactgcgcctgattgccggacggcagtcacaggaaatcagcacgattttaggttatgaatacggcgcagtggctgttcaccgcgacgatatgattgtcagttaaggatatcagcatatgttagaacaaatgggtaaagcggccaaagccgcctcctgggcactggctcagctttccggaaaacagaaaaatcaggctctgacccgcatcgccaatctgctggaacagaacagtgcgccgatccttgctgccaatgaacttgatattgccaaagcccgtgagcagggtacctcagaggcgatgcttgatcgcctgctgctgacgcaggcacgcctggaaagtattgctgcggacgtgcgtaaggtgtgtcagctggcggatccggtcggggaagtgatcgacggcggtgtgctggaaagtggtctgcgccttgagcgccgccgtgtgccgctcggtgtggtcggtgtgatttatgaagcacgcccgaatgtgacggtggatgttgcctcactgtgcctgaaaaccggtaatgcggtgatcctgcgcggcggcaaagagacacacaataccaatgtggcgatggtccgtgttattcagcaggcgctcagcgagtgcggtctgccgcaggcggctatccaggcgattgataacccggatcgtgcgctggtcaatgaattgctgaagatggatcgctatgtggatattcttattccgcgcggcggtgccggtctgcatcgtctgtgtcgtgagcagtccacgatcccggtgatcaccggcggtatcggcgtgtgtcatatttttgttgatgaaacggcggatctgcataaaacactgccggtcatccgcaatgccaaagtgcagcgtccgagtgtctgtaatgcggtggaaacgctgctggtgcatgaaaaagtggctgcagaattcctgccgctgctgagtgatcacatggcggcggataatgttaccctgcatgcggatcctgccgcgctggcgctgctgaaaaacggcccggcgaagacggaagcagtaacagaagcacagctgtcagatgaatggctgtcacttgatctgaatgtggtgattgtgaaggacattgacggggcgattgagcatatccgtcattacggcactcagcactcggaatcgattctgacacaatccatgtctcaggctgattatttcgtctcaaatattgattcatcagcagtttatgttaacgccagcacccgtttcactgacggcggtcagttcggactgggcgcggaagtcgcggtcagcacccagaaactgcatgcccgcggcccgatggggctggcggcactgaccacctataagtggatcggggtcggtgaccacacgatccgttcataaacaggccgttatgcatccgcaggacgttttttgtcagatgacagccacgttctgcggatcgcgctttagctttttatctgagtacgctatgataggccatcttaatttacacttatgtaaaatattatgaacacctgcggagaaagcggatagtatgaatcatcaggatgagaaaccgattatttatcttatcggcgcccgcggggctggcaaaaccacggtgggtaaaccactggcacaggcattactgtacgattttattgacactgatgcctgtgtgacagaacagtgccggatgtctatctcccagctggtggaacaatcgggctggcgcagtttccgcgagctggaaagtgatgtgctgcgtcaggtcagtaaaccgcaccgtctggtctccaccggcggcggcattgtgatggcaccggaaaaccgggcgtttatgcaatcctccggcaaagtggtgtatctgcgcgccagtgccgaaaccctggcggaacggttgtcacacacacctcaggcgcatcagcgtccgagcctgaccggcaaatgcattgtggaggagatggcagaggtgctgagcaaacgcgagccgctctatctggaatgcgcggatatcgtggtggatgccacctgtccggtgccggaactaatcagtcagatctgcacctgcatccacgccgccgtatagtgcctgttgctgtattattgtgaacagtgacacaaatcgaataaaggtaattccgtaccgctctgtcagttggttaatcaatccgctgtgttattattaaagcgtctgcccgccgaactgattggcggaataataaatacacagggaattcagtatgttgatgaatgtgttacgtgcactgctccgcggattattccgcattcgtgttacaggtgacctgagtaatcttaatcaaccgcgaagtgtaatcaccccgaaccacgcctcttttatcgatggtgttctgctgggattattcctgccgacccggccggtgttcgcgatgtacaccaattatgccacgccatttttcatccgctgtttaaaacccattgccgatattattccggtggatccgcgtaatccgctggcattgcggcatctgatccgcgaagtggaaaaagggcgtcagatagtgatcttcccggaagggcgggtgacgatcactgattctctgatgaagatctacgacggcgctgcttttattgctgccaaaaccggcgcgaaagtgatcccggtgcggattgacggcgcggaactgacgtatttcagccggatgcggaaagtgatcaaaagtcactttttcccggccatcaccattcatgttctgccgccggagaccattccgatgccggaggcaccgcgtgccgcagagcgccgccgtctggcgggggaacatctgcgcgacattatgatggatgcacgcatgacgtgccgcccgtcactgacactgccgcaggcgtttctcggcgcggtaaaacgttacggccgtttccagcggatcattgatgacatcaatttcagtgaggacagttatcaggggctgctgaaaaaatccctcggactaagctgtattatcagccactacaccaaagagggggagcgcaccggtttcctgctgccgaatgccaccgtgatgggagcggcgatcctcggcgcttccatgcgccgccgtattccggcactgcttaactacacagcgggtgtcgccgggctgcggaatgccatgaaggcggcggggatcactaccatcatcacctcgcgccagtttctggaaaaaggcaaaatgacacatttgccggaacagatgacagaagccaactgggtctatctggaagaggcaaaagcatccgttaccctgaaagacaaactgtgggtgatgcgtcacctggtcacgccgcaggcggcactgctgccgcaaaagccggaagatgatgcgattattctttttacctccggctcagaaggcacaccgaaaggtgtggtgcacagccacgactctctgctggcgaacgttgagcagattaaaacggtggcggatttcacgccgaaagaccgttttatgtccgcactgccgctgtttcacgcctttggtctgactgccgggcttatcacgccgctgctgtgcggcagccggattttcctctatccgagcccgctgcattaccgcatggtgccggagctgacgtacgatcagaactgtaccgtcattttcgggacatccaccttccttgccaactatgcccgttttgctcatccgtatgattttgcccgtgtccgctatgctgtggccggggcggagaagctggcggaaggcaccaaacaggtctggcaggataaattcggcctgcgcattctggaaggttacggggtgactgagtgtgcgccggtgatttccattaacgtgccgatggccgcccgtaccggtactgtcggacggctgatgccggggatggaagcgcggctgctgccggttgccgggattgaaaacggcgggttgctgcaggtgcgcggcccgaatgtgatgaaagggtatctgcgggtggaaaaaccggggcagattgaaccgccgtcagcggagaatatacagggcgaggttcagatcggctggtatgacaccggcgatatcgtcacacaggatgcagccgggtttatcactatccgcggacgggtcaaacgctttgccaaactggccggtgagatgatctcgctggagagtgttgagcagctggcactgagtgtttcgccggataaactgcatgccgtggtgacgaagccggatgcaaaacgcggcgaagcactggtgatgtttaccactgacagtgaactggatcgcacacaactgctgacagaagcgaaagcgaaagggctgccggaactggctgttccgcgtgatatccgttatatcagacagctgccggtgctcggcagcggtaaaccggattttgtcacactgaaacaacaggcattacaggagccgcaggtatgacagcatccgccccgttactgaacaaaggcatgaaagcggtactggtttcccagtttattacggcatttgcggataacgcgattctgttcgccatccttgcacagctcagcgcccggcactatcccgaatggagccagccgatgctgcagatggtctttgtgctgacttttattgtgctggcaccgtttgtcggacagattgccgacagcttcccgaaagggcgggtgatgctgctgtcgaacgcctgtaagctgttcggcgcggtggtgatctgcttcggcgcggatccgttcctgggatacgggctgatcggggtcggggcggcggcctattccccggcaaaatacgggatccttggtgagctgaccaccggtgagcaactggtgaaagccaacgggctgattgaagcgtcgacgattgtggctattctgctgggctcggtaaccggcggctttctgtctgattaccatattacaatggcactgattttatgcacggtgatgtacgcactggcggcagtgaccaatatctatattccgcggctgccgccggcgaaaaccggcctgagccgcaatccgcgcacgatggtggtcactttcttccgcgctgtagtatcactgtggaaaaaccaggaaagccgtttttccctgaccggtaccagtctgttctggggcgcgggcgtgacactgcggctgatgctggtattgtgggttccggcggcgctgggtattaccggccagaccatgccgacactgcttaacgccatggttgctatcgggattgtggcgggggcggggctggctgcccgctttatcaccctggaaaccgtgcgccgctgcatgccggccgggatcctgatcggggtgatggtcattattttcaccttccagacctcggtggtaccgaccaatatcacgctgattatgctcggtgtattcggcggcctgtttgtggtgccgctcaatgccctgctgcaaaagcgcggtaaagagactgtcggggcggggaacgctattgcggtacagaatatgggggaaaacggtgcgatgctgctgatgctggggctctactccctggccgttaaagcaggtgtgccggtggtggtaatcggtgcggcgttcggcagcctgtttgccctcgccatcggcggattatggctctgggatatccgccgcaaaaaacagatttcacaacaggagtgaccgatgcatgatgaacaggctctgacccggcgcagtacggaactgggatcttatctccttgaggccggtctgagtgtcacaacggcagaatcctgcaccggcgggtggattgccaaggtgatcacagatatcgccgggagttcggcgtattttcagcgcggatttgtcacctacagtaatgatgccaaacacagtatgatcggcgtatcagaacagtcactgtccgcctttggtgcggtcagtgaggcggtggtccgcgaaatggccgccggggcgctggacactgcggatgcggatctggccgtctctgtcagcggcattgccgggccggatggcggcagtgatgaaaagccggtcggcacagtctggttcggctgggcgtggcgggaaaaaacaggaataaaaaccgcggcccgcagctggtgttttccgggcgatcgtaatgcggtgcgctgtcaggcggtgctgaaagggctcgacggattaattgcaattctgacgaaaaaatcacttgatactgtatgactatacagtataatcagttcaacagattcagttgaaaccattttaataaccctggcggtgtctcaggggttgagaagggagtttacatggctattgatgagaacaaacagaaagcactggcagcagccttaggtcagatcgagaagcagttcggtaaaggttcgatcatgcgtctgggtgaagaccgttccatggatgtggaaactatctcaaccggctctctggcactggacgttgcactgggtgcaggtggtctgccgctgggacgtattgttgaaatctacgggcctgaatcttccggtaaaaccacgctgacattacaggttattgccgctgcacagcgtcagggccgtgtgtgtgcgtttatcgatgcggaacacgcactggatccggtctatgccaagaaactgggcgtggatattgataacctgctgtgctcccagccggacaccggcgagcaggcactggaaatctgtgatgctttaacccgctccggtgctgttgatgtcatcattgttgactccgtggcagcactgacaccaaaagctgaaatcgaaggtgaaattggtgattcacacatgggtctggctgcccgtatgatgagccaggcgatgcgtaagctggccggtaacctgaaaaactccaacacactactgattttcatcaaccagatccgtatgaagattggtgtgatgttcggtaacccggaaaccaccaccggtggtaacgcactgaagttctatgcctctgtccgtctggatatccgccgtatcggcgcggtgaaaaacggtgatgaagtggtcggcagcgaaacccgcgtgaaagtggtgaaaaacaaagtggctgcaccgttcaaacaggctgaattccagatcatgtacggcgaaggtatcaacaccatgggcgaactgatcgacctgggtgtgaaacataaactggttgagaaagccggtgcatggtacagctacaacggtgaaaaaatcggtcagggtaaggcaaacgccacaatttacctgaaagaacatccggaaatggcggatgaactggataaaaaattacgtgagttattactgaatcacagtggtgaattcagtaccgcagcagaaagtttcaacgaagaaagtgaaactgaagatgcgggcaacgaagagttttaattcgtaaaaccacactgattttaagatttaaagtaataaaatcattgagttattctgaaagctgtatccgtgacgggtacggctttctttttatctgcggacaaccacctgtctctgtccttcataccgtgttctttatacaaaaacccctctcccggccggatgaacgccgtttgtacgaacagactttcagaaaaagtttattcgctttacaatgggtacagcgaatggatttatctgggaattaatgttcaagggaaacccttaaatttctctccgccttgattgatccgaaggttgaatcggagcggcttcacagtctgtttcgcaattcataaatcttattatttcagcttgatttcgggataaatatgagcaaaagcaccgctgagatccgtcaagcgtttctcgactttttccatacaaaaggacatcagattgtccagagcagttcgctggttccgaacaacgacccaacgctgctttttactaacgcagggatgaaccaattcaaagatgttttcctcggtctggataagcgtccttacacccgtgccaccacagcacagcgctgtgtccgtgccggcggtaagcacaacgacctggaaaacgtcggctacactgcacgtcaccacactttcttcgaaatgctgggtaacttcagcttcggcgattacttcaagcacgatgccatcaatttcgcctgggaactgctgaccggcaaagaatggtttaacctgccgaaagaaaagctgtgggttactgtttatgcaacggatgacgaagcgtacaacatctggaaagatgaagtcggtgttccggctgagcgcattatccgcatcggtgataacaaaggtgcccaatacgcctctgacaacttctggcagatgggcgataccggcccttgcggtccgtgtactgagattttctttgatcacggcgaccacatctggggcggccctccgggatcaccggaagaagacggcgaccgttacatcgagatctggaacatcgtctttatgcaattcaaccgtcagtctgacggtacattagagccgctgccgaaaccatccgttgataccggtatgggtctggagcgtattaccgctgttctgcagcatgtaaactctaactatgatatcgacctgttccgcaaactgattgccgatgtggcgaaagtgaccggtgctgacgatctgaccagcaaatcactgcgcgtgatcgccgaccatatccgctcctgtgccttcctgatttgcgacggcgttattccgtccaacgaaggccgcggttatgtgctgcgccgtatcatccgccgcgctgtccgtcatggctacatgctgggcgcgaaagacaccttcttctacaaactggttgcgccgctgatcgacgtgatgggctctgccggtgaagaactggcccgccagcgtgtgatggtggagaaagtactgaagtcagaagaagagcagtttgcccgtacgctggaacgcggcctgcaactgctggatgacgaattagcctcactgaccggggataccctgagcggtgaagcggcattccgtctttacgacacctatggtttcccgctggatctgaccgctgacgtctgccgtgagcgcaacctgaaagtggatgaagccggttttgaagcggcaatggaagaacagcgccgccgtgcccgtgaaaacagcggttttggtgcggactacaacagtctcatcaaagtggacaagcgcagtgacttctccggttatgaccacaatgaacaggcggcaaccattgttgcactgtacaaagaaggtcagccggttactgagctgaatgccggtgatgaaggtctggtgatcctggataaaaccgcgttttatgcggaatccggtggccaggtcggtgataccggtgtgctgtcgagcaacgatgcgcagttcagcgttctggacacacagaaatacggtcaggctatcggccatgccggtcgtgtggacagcggcaaactgacggtgaaccacaaaatcaccgcgaaaatcgacgaagagcgccgtaatgctatccgcctgaaccactcggcaacacacctgatgcatgccgcgctgcgtcaggttctgggtgagcatgtgtcacagaaaggctcactggtaaacgataaatacctgcgttttgacttctctcactttgaagccatgacaccggcacaaatccgtgaagtggaagctctggtcaacgccgaaatccgcaaaaatgagccggtcgtgaccgagctgatggatctggaagaagcgaaagccaaaggtgcaatggcactgttcggtgaaaaatacgatgaacgtgtccgtgtactgagcatgggcgacttctcaaccgagctgtgcggcggtactcacgcggcacgcaccggtgatatcggtctgttccgtattatcagtgaatccgccacagcggccggtatccgccgtattgaagcggtcaccggtagcggcgcactggaaagcgtgaatcagcagtctgatgcactctctgcggtggctcagctggtgaaaagtgatgaagccggtgtgagcgaaaaagtcaaagctgcgctggataaaatccgcaccctggaaaaagagttacagcaactcaaagaacagcaggctgcgcaggaaagttcctccatgaccaaagatgccgtttcagtgaacggtgttaaactcctggtgaaacaactgactaacgctgaacctaaaatgttacgcacgatggttgatgatctaaaaaatcaattaagctctggaattattgtgctttcaactatcagtgatgataaagttagcctcattgcaggtgtaacgaaagatctgaccggcaaagtcaaagccggcgaactggttgcctttattgctgaacaaatcggcggtaaagggggcggtcgcccggatatggcccaagccggcgggacagataccgctgctttacctgctgctatggcaagcgttgaaagctgggtggcatctcacctgtagtctgagtaaatctgaacaggagcgcgctccggcgtgctcctgatattggtgataaggtctttgtatcactaacgttaggtcgcaatttttaactacactaaatattgcaatgtgtctaaaactacatatagtttacaaataatcattgctatacgctttcacggtgttggatggataatggcgggtaaactcagaggcccgactcttttaatatttcaaggagcaaagaatgcttattctgactcgtcgagttggtgaaacactcatgataggcgatgaggtaacagtgactgtactgggtgttaaaggaaaccaggtacgaattggtgtcaacgcccccaaagaggtttctgttcaccgtgaagaaatttaccagcggatccaggctgaaaaatctcaacccaataacaataactattaagttgtgaggcgcgctcgttaccgcgacgggcgccttcttcttttcttcctgccgctattatcccggctcctcactttttttcctgcaaaaatcgcccgtcattctgttactttctctgctcactgccggattttttcctcaccgccgcgttatgctgacgtggatcctgttgccgtaaaaacacacgtatcgttgtgaaaatcaacatagtgcgcggtaattgtgcaaacgatcgtgagatcttaaaaagttgggaaaaattgtttgacttctcagtgggggaaagtaatatgtgcgccacacgacgacgagatgacggaaacggaaatcatcgttgtgtggtctggaacaatggtgagatggccgagaggctgaaggcgctcccctgctaagggagtatgcggtcaaaagctgcatcgagggttcgaatccctctctcaccgccattcagattgcacccgtagctcagctggatagagtacccggctacgaaccgggcggtcagaggttcgaatcctctcgggtgcaccatttgaaccccacgatactgtcatggggtttttattttggcaaaagaaaatgctaagataaaaaatcagttctgaaaagatgttttaaggtacgcacccgtagctcagctggatagagtacccggctacgaaccgggcggtcagaggttcgaatcctctcgggtgcaccatcttatcaccttatttcaaaactgatttccggtaacagaattagtatgcgatgcacccgtagctcagctggatagagtacccggctacgaaccgggcggtcagaggttcgaatcctctcgggtgcaccatcttcctctcttatcccatattcagcacccgtagctcagctggatagagtacccggctacgaaccgggcggtcagaggttcgaatcctctcgggtgcaccatataaaaaccccgctctttgagcggggtttttctttttccgtttttcccgtcactgaatcgaatccgtttttacgtcatactcgttatctgaagtacagatgcttctgaaactgatcttaataacaatgacgtgtaagagggataatgtattgtcgcggcagtggtttctgctgttccgtttgtgtggggcagggttgaatcacagcgacaataacccggctttgcgataaagtatccctcttatgaataatatccattatcaggacgggaggtcgatttgatcccggatgtatccaaagcgctctcatggttagagacgcacccccggattttaaaaggcatcaaccgcggcattgagcgcgaaacactgcgtatcacgccggatggtgccctggcacgtaccggtcacccggaagggctgggaaaatcattaacccataagtggatcaccacggactttgccgagtcactgctggaatttattaccccggtggattcgcgcattgattacaccgtgaaatttctgcgtgatgtgcaccgctatactgcgcgtcatctgaacaatgaacggatgtggccgctgagcatgccatgcttcattgattctgaagagcatatcgaactggcgcagttcggcacatccaatgccggccgtttcaagacgctgtaccgtgaagggcttaaaaaccgctatggcgcgctgatgcagaccatttccggtgtccactataacttctctctgccgatggaattctggcaggcgtggagtggtatcagtgatgcacagagcggcaaggataaaatctccgacggctacttccgcctgatccgcaactattaccgtttcggctgggtgatcccgtatctgttcggtgcatcaccggcgatttgcagctcgttcctgcgtggccgcaaaaccaatctgccgtttgaaacgctgccgaaaggggcgttatatctgccgtatgccacgtcactgcgtttaagtgacctcggttataccaacaagtcacaaagtgatctgaacatcaccttcaaccatctggacacgtatgtcgccgggctgaagaatgccattcagatcccgtctgaagagtttgccgcactgggattaaccaaagacggaaaacaccttcagattaacgccaacgtcctgcagatcgaaaacgagttctatgcccctatccggccgaagcgtgtgcagaaaggtgatgagtcaccgtctgacgccttacagcgcggcggggtggagtatatcgaagtccgtgccctggatatcaacccgttctctgctaccggtgtcgatgaaacacaaattcgtttcctcgacctgttccttatctggtgtgtgctggcggatgcgccggaaatgagcgcggatgagctggcgtgtgcccgccataactggaatcgtgtgattctggaagggcgcaaaccgggacaggaaatcggtatcggctgcggccgtgaaaaacaacccttgcaaaaagtgggtcacgcactgtttaatgatctcctgcgtgttgccgatgtgttagatacctgctcaggcacacagtatcgcgaagtgtgcgaagcactgaaagtacagtttgatgacccggaactgacgttctcggggcggatgctggcactgataaaagaagcgggtatcggaagttacgggctggccctggcagatcggtatcatgaagaactgactcacgagccgtatgaagtgatcagtgaagcagactttgctgaacaatggcaggcttctgtcgataaacaaaaagcgatggaagagagtgatacgataagttttgatgagtatctggcgctgcatggcggtcgctgatttctgacagataagaaaatggccacaatcaatgtggccaaaataaatctctcagagaatagggatgataacaatttgcgcgtctttcaatacatcagaccagcgtattcagaaaaagtttcattcgttcggcattttttacaaaaaaaagaggagcgggaattatgcctttgctggatagttttttagttgaccacacacgcatggcggcacctgcggtacgcgtagcgaaaaccatgaccaccccgggtggcgataccatcactgttttcgatctgcgtttttgtgttcctaatgaagagattctgccggaaagaggaacgcatacactggaacacctgtttgccggttttatgcgtaaccatttaaacggcaatggtgttgaaatcattgatatctcgccgatgggctgccgtaccgggttctatatgagcctgattggtgcgccgtcagaaacccgtgttgcacaggcctggaaagacgctatggcggatatcctgactgtcaaagatcaggcgaagatccctgaactgaacctgtatcagtgcgggacgtataaaatgcattcactggaagaagcacatcagattgcaaaaaacatcattgagcgcgatgttcgcgtcaacaaaaatgatgaactgctgttatctgatgatgagctggaaaaactgcatccgtaatttttcagccccggatacaaaaaaacctgcgcgcattgctgccgcaggtttttttatgtcttttatctttttcagatatcagcagcgatatcggcaccggccggtttcagcggtgacagttttaccgttttaatcacattctcgccgatggcaaccacttcaaactggtagttaccgacagtgacaagggtattgagtgtcgggatatcaccgagttcttccagcagaaggccattaatggtacgggcaccttcttccggcagggaaagattcagggctttattgatttcacggatattggcagaaccttcaatcagcagcgtgccgtcaggctgacgggtgacttcctcggccagcgatggtgacattgaggtggtaaaatcaccgacaatttcttccaggatgtcttccacggagataagcccctgaatatcgccgtactcatcgacaactaatccgactttttcattattgcgctggaaattgaccaactgtaagttcagtggtgtgctgtccggcacaaagtaaactttatcagcggccttgataagcatttgcttggtgaattcctgcttctcaatcatcagccggtaagcttcacggacacgcagcataccgatggcatcatccagcgagtcgcggtagagcactatccggccgtgcggtgagtgcgtaagctggcgcagaatggatttccattcatcattgatatcaatcccgatgatctcagtgcgcggcaccataatctcatccacactgactttatccagatcgaggatggagatcagcatgtcctggttgcggcgggacagtttacctttggactcattaacgatggttttcagttcttcttttgatactgcatcactgcggatcacggtgccgcggataccgatgcagcgcatcagaatcagggttattgcgttaaatgcccagaccagcggcagacagatttttgccagcggacgcagcagaaaactgctcggaaaggcgacctgctgcggatagagtgcggcaatggttttcggcatcacttcggcaaacacgaggatgacaaaggtcagcaccccggtggcgatagccacaccggcgttaccgtacaggcgcataccaacaatcgtccccagtgcggaggcgacaatattcaccaggttattaccgataagaatgaggctcagcagacgatccggtttctccagcaaccgctcgacacggcgggccgcccggtttccctgcttggcctgatggcgcagccggtagcggttgattgtcatcatcccggtttcggatgcggaaaagtacgctgaaattatcactaataaaataagaataataatcagcgtacttgttgagacgtgctccacagcggtgttcctttcttttgtgatgagcggaaaagggcgttacagagaccggctgttatgcatacagcatcagttcctgaaacagacggtgcccgaaaaatgccagtgtgagaataaaggcaccggcgaagttaaaccagataacccgtttgccgcgccagccttcatgatagtgcccccacagcagcacgatgtagacacaccaggcaaccatcgacagcaatgatttatgaatattatctttatcaaagatgttatccataaacacaatgccggtggcgagtgttagtgtcagcagaatcacgccgacctgcgtgatatgaaacattttacgctcgataaccattaacggcggcatatccggcgtaaacttaagacgtttgtttttcagctgatgatccatccagccgagctgcatagcatacagtgccgcaataatcagtgtcgcgaagctgagcagcgccagtccgatatgcacaaacagcggcacactggcctgcaggtgggtgataaactcgcccggcatcagggtggcaagaatcaggttgaccatcgagaagctgtaaacaatcgggataaggaaccacgcccggccctgaaacgcgacaatcgtcataatgacggagaccagcaggctgaccaccgaaccgaggttcagcagtgtcaggttctgaccaacgccctgaaaaatctgtgatttaatcgccacgccgtgacacaccagagcgataacggcgaagataagcgccagtttccggtagccgcgctgatagcggagcacgcccggcatcagaagtaccaggcttaacagatatgcgctaattgcaacaacagagatttcaggcatggttttgtgattattcagtcagtaagatgaaacaaaattcatacgccagtataccgcagcccgcagatcactccaatgattacacgatactttacgtaaatcggttcgctgatttgctgcggtgcgtgttataatcccgggtatcttttctatttttagctcagttttggcagagtcgatgacatgtttgataatttaactgacagactttcgcgcaccttgcgcaatatcagtggtcgcggacgactgacggaagacaatattaaagaaacgctgcgcgaagtgcgcatggcgcttctggaagccgatgttgccctgccggtggtacgggatttcatcaaccgcgtcaaagagcgtgctgtcggccatgaggtgaataaaagcctgacgccggggcaggagttcgtcaaaatcgttcagggcgaactggttgcggcgatgggcgaggaaaacaacgccctggatctttccgcccagccgccggctgtggtgctgatggccggtctgcagggtgcgggtaaaaccaccagtgtggcgaagctcggtaaactgctgaaagaaaaacacaagaaaaaggtactggtggtctctgctgacgtttaccgtccggcggcgattaaacagttacagacactggcagagacagtgggaattgaatttttcccgtctgatgtgtcagaaaaaccgattgatatcgctaaaaaagcgctgaaacatgcgcagctgcaattctttgatgtcctgctggtggataccgcaggccgtctgcatgtcgatgaaggcatgatgggcgaaatcaaagacctgcatgcggccattaacccggtggaaaccctgttcgtcgtggatgccatgaccggtcaggatgcggcaaacaccgccaaagcctttaacgaagccctgccgctgaccggtgtggtgctgactaaagttgatggtgatgcgcgcggcggtgcggcgctttctatccgtcatatcaccggtaaaccgattaaattcctgggggtaggggaaaaaactgaagcactggagccgttccatccggaccgcgttgcctcccgtattctgggcatgggcgatgtgctgtcactgattgaagagattgagagcaaagttgaccgtgatcaggcggagaaactggcttccaagctgaaaaaaggtgacggatttgacctcaacgacttcctggaacagcttaagcagatgcgcaatatgggcggcatggccgggatgctgaccaaactgccgggcatgtctcaggtgccggacgcggtgaaatcgcagatggatgacagcgtgctgaccaaaatggaagcgatgatcaattccatgaccaaaaaagagcgcgtcaaaccggaaattattaaaggttcccgcaaacgccgtatcgcagcgggttccgggactcaggtgcaggatgtcaaccggctgctcaagcagttcgatgatatgcagcgcatgatgaaaaagatgaagaaagggggcctcgcgaagatgatgcggggcatgaaaggtatgatgccgccgggtatgatggggcggtaaaacaaagaaagtcacaaagaataatcactttggattgattttttcgccaaagtgagtaaacttttcgggctttttctatgacaaccggacgccattcctcgatggggtctggttgtttgtcaattcaatgaggatgttatggtaacaattcgtttagctcgtggcggcgcaaaaaagcgtccgttctaccaaatcgtcgtaaccgacagtcgtaatgcacgtgacggtcgtttcatcgaacgtattggtttcttcaaccctatcgctgccggtaaggctgaaactctgcgcttagatctggaccgtgttgaacactgggttggtctgggtgcaactgtctctgatcgtgttgctgtactgatcaaagacgcaaaaaaagcagcttaatctgtcacggtggtaacaatgagcaagcacactaatccgcaagccccttctgatccgattgtactcggcaaactggggtcatcttacggtattaaagggtggctcagagtgttttcttccaccgaaaatactgaaagtatttttgattatcagccgtggtttatccagcgtaacggggtgtggcaacacatcgaaccggaagactggaaatcccacaatcaggatatgatcgtcaaactcaaaggggttgacgacagagatgcggcaaacgtactgactaacgcggaaatcgtggtagacagttcgcagttaccggaattagacggcgatgattactactggaaagacctgatgggctgccgtgtagtgaccaccggcggatatgatctcggcaccgtaaccgatttaatggaaaccgggtcgaatgatgttctggtgattaaagcaaatctgaaagatgccttcggcatgaaagagcggttagtaccgtttcttgacgggcaggttatcaggaaagttgatctcactgaaaaactgattgaagttgagtgggatcccggtttttaaacctccggtgatggttttgtcattaagtgggacacgaaaatgtggattggggttatcagcctgtttcctgaaatgttcctctcaataaccgggcatggtgtaaccggacgggcagtaaaaaacggcctgatcagtgtagattgctggaacccgcgtgatttcacgtatgaccggcaccacactgtggacgatcggccctacgggggcggtcccggcatgctgatgatggtggagcctctgcgcaaagctatccatgcagcaaaagctgccgcaggtgacaatgcgaaagtgatttatctttcgccgcagggccgcaaactcgatcaacagggagtttgtgagctggccgccaacgagaagttaattctggtgtgcggccggtatgagggagtagatgaacgcgttatccagactgagattgatgaagaatggtcagtcggggattacgtgctcagcggtggtgaattaccggcgatggtgctgattgatgcggtatcgcgttttgttccgggtgtcctcggacatcaggcatcagcaaaagaagattcctttgctgacggtttacttgaccacccacactatacccgccctgaagtgttggatggcatgtgtgttccgccggttttactgtcgggaaaccatgcagaaattgatcgctggcgtatgaaacagtcactcggtcgcacctggctcagaagacctgaacttctggaaagcctagctctgactgacgagcaaaggatgttgctggctgaattccagcgggaatatcagtccggagcaacaagttaatccaggtatcctgcgggatatcttttgaaatatcagtttacctagggtaagagatttattatgagcaacattattaaacaacttgaacaagagcagatgaaacaagacgtaccttcattccgtccgggtgacaccgtggaagttaaggtatgggtcgttgaaggttctaaaaaacgtctgcaggcattcgagggcgtggttatcgctatccgtaaccgcggtctgcactctgcattcactgttcgcaagatttctaacggcgaaggtgttgagcgtgtattccagactcactcacctgttgttgacagcatcagcgttaaacgccgtggtgccgttcgtcgtgctaaactgtactacctgcgtgagcgttcaggtaaggcagctcgtattaaagagcgtttgaacgcaaaataatgcgcaagcatccgatatgataataaaaggccagcctcgtgctggccttttttatacgctattttattttcctttcctgcctgttttccgttcgattctctgtattgtttatatgacattatttttatgatgtaaatatttatttacatcatacctgccttataaactacctttctttctgtcattatcttacacactataaccttaacccgatcaattaactctattttcaatgaattagcgtttatttgtaagcggtgtagctgatgggggttatctgtgcagaacatctcatttttattttgtaatttaaaatgtacgaaaagttaaatattttacgattttggattgaattatttacaaaggatgttatggtgttttctcagacactcaacacgtaatccattttttgtaaaactcagcaggaaaacactatgatcatgcaaaaagacgcactcaataacgttcacatcagtgatgaaattgttttaatctcaccggaagaactgaaacaaaagtacccattgagtcgcaacgaccagcatgccatcgccggtgcacgtaagacgattgcggatattgttcatcaccgcgatccgcgtttactggttgtctgtggcccgtgttccgttcatgacacggatgcagcgctggagtatgcccgtcgtctgaaagaattatctgctgagttgagtgacagtctgtatatcgtgatgcgtgtctattttgagaaaccgcggacaaccgtgggctggaaaggacttatcagtgatccgtttatggatggatctttcgagatggaaaaaggtctgcacatcgcccgcaaactgatggtggatctggttcagctcggcctgccgctggccggtgaagcgctggatccgaataacccgcagtacctcggggatctgttcagctggtctgctatcggtgcacgtaccactgaatcacagacacaccgtgaaatggcatccggtctgtccatgccggtcggctttaaaaacgggactgacggcagcctgagcactgccatcaacgccatgaaagctgcgtccatgccacaccgttttatggggatcaaccagtccggtcaggtctgtctgttacagacacagggtaacccgaacggccatgtgatcctgcgcggcggaaaacgcccgaactacagtgcggaagatattacggaatgcgaggcacaaatgaagaaagccggtctcaccccttcactgatggtagactgcagtcacggcaactcggataaagatttccgtcgtcagccgctggtggtggatgccgtggcagaacaaatttgtgccggaaatacctcaattaccggtattatgctggaaagccatattaatgaaggcaatcagtcatcagaacagccgcgcagtgccatgcagtacggcgtgtcagtgacagacgcctgcatcagttgggaaaccactgaagcagttctgcgtcagctgcatcagcagatctcaccggcgctggcagagcgtgtggttcagttacagcaggcaggataataaaaacaggcagggtgtatgtccggtgcattaacacatttacgtgatcaaattgatgaagtggataaatcgctgctgtcactgctggcaaaacgcctgcagctagtggcggaagtcggggaagtgaaaagccagcacggcctgccggtctatgcgccggatcgcgaagccgcaatgctggcatcacggcggcaggaggcggaatcactcggggttccgccggatctgatagaggatttgctgcgccgtatcatgcgggagtcctattcccgtgagaatgataaagggtttaaaaagctcaatgagcaggcccggccgatagtgattgtcggtggtgacggcaagatggggcagttgttccggcggatgctgacactgtccggctacaccgtgcgtattctggacagcggcgactgggcggatgccccggaactgctggcagatgcgggcatggtgattgtcagtgtgcctatccacctgaccgaacaggttattaaacaattaccgccgctgccggaagattgcattctggcggatcttgcgtcggtcaaagcggggccgttacaggcgatgctggcagtacacaacgggccggtgctcgggttgcacccgatgttcgggccggatgtcggcagttttgccaagcaggtggtggccttttgtgacggacgtttcccggagcggtatcagtggttcctggagcaaattacagtctggggcgcgcatttacagggtattaaggcgcaggagcatgatcgcaatatgcgctacattcaggcgctgcgtcacttcaccacttttgcttacgggcggtatctggcaaaagaaaatgtcgatctcgcgcagctgctgtcattgtcatcaccgatttaccggctggaactggtcatgattggccgcctgtttgcccaggatccgcagctttatgctgatatcattatggcctcggaagataacctggatgtgatagaggattatcaccgtgagttcggtgaagccatgtcactgctggaaagccgggataaagcagagtttatttcgcagttctctgccgtcagtgactggttcggcgaacacgcgcagcgctttatgaaagagagtcagggattactgcaacaggctagcgacagccgccgctgataaatatgaaggtgctgatgttttcagcaccttcatacattgccggttatttcacaccatttcccgaagggtagaaggtttttggtactgcctgatgagatacctttttcataatgacagcgcgcggatcccatgcatgtttgagtttggattcaatattaaattctttgttatgaatatagttataaccggcagtaattgtttgctgattggagtaagcaatgaccggacgacctgtcacatcagcaaggtcttgcgcagcctgacgttttgcaaaacaactaactaaatggataggaccgttattcctgagtagatcaactgagcctccggattttttatttatgtaagccaccagttcttgtgcattcagacattgtgcttcactcagatccgtttttagctgaacttgcccgtttattttaaccagcctgttattttctataacggcggcagccttaccaccaacctgtatgagtccgtctttccagtgtccatgcagcagaatggcatcttctttattgccacggaagttattgcagtaaccccggaacgtgatgctttgatcctgattcacatcctcatcaagacataggttaacctgcttaaatgtgggttcagctggtttatggctggtcattttaatatcagaaacagaatgtaatgaagcaaacaggtttttaactgctgattttacagatgattcaatcacatgaaatttagctgataagatttctgatgatatgtgcataatttattttccgctgatttatatcgttaatatatgttcagcgaaaaatagcaccagaccatgcagatcactttcaaataatgagctgactagctatgccgggtaaaataaagatgagatgaagaaaagagaagcagccatctgcataacagatggctgaaggaggtattatgcgcgatcaaccgggaaggcgatcacatcactgatccgctctgcacccagtgcgagcataatcaggcggtcaatccccagtgccacacctgcacattccgggaatccgtgctcgagtgctgccagcagattttcatcaatcggctgttccggaagacccatagctgcccgtttgcggttatcccgttcaaagcgctgacgctgctctgcagcatcagtcagttcacggaagccgtttgccagctcaacccctttgtaatacacctcaaagcgctcggccacgcggtgatcttcagagctgatctccgccagtgacgcctggcttgccgggaagtgataaataaaggtcggtttttccagcccgatatgcggctccacacccaccataaacagcaactgcaaaatagtatcgcgatcttcctcagtatcggcaatattgctgacatccagtttggccgcaacttcacgcagtttgtctttctcggcggtcagcggatcgatatccaggtagcgcaggaaagcctgctgataggataacgattctgcactttcacactctaaggtttgctgtaataaatcatcaacctcatttatcagacggtacatatcataatgaggacgataccattcgagcatggtgaactccggattatgatagcgtccggcttcctcgttacgataactgcggcccatctgataaatagggccgctgcccgctgccagtaaccgtttcatgtggtattccgggctggtcatcagataaagcgttattccctgtgcggctccggggccggtaaactgagtttcaaaggcgcgcagatggacatcggtgacggtcgcctgactcatggtcggcgtttcgacttctaatacacctctgtctgcaaaaaaatgtctgatttcattaacaatttttgcgcgttttaatagattggctatcggggcagtcggctgccagcccgcaatatcactcatgccgtaagaactccgaataaaaataaagggtgcagtttacccgcaacctctgatggtgacaaacagatatgcagaacatgctacgtgtaaaaccgtactctgaacaggcgtattgtgcggtggcggggcgcggcagcaccccgggcaggtataatcagccgattaaggcaggcgggacatgttcccccggataactgccgagcaccttcactgaacgggcgattgcctgtaacgctttgagcgcctgctgcatcggtactgagcgcagattggcatgcacatcaatataaaacatctcttcccacggcgtgccgtgaatagggcgggattccagtttgctcattacaatgtcatgctctttcaggataatcagggcatcgaccagcgcaccggcctgttgcccggtcgccatcagcagcgtggttttcgccggtacctgctctgacacatcaatcggctggcgggcaatgacaataaagcgcgtcatattggtctgctgattggcaagattctgtgcgatcgcctgtaacccgtacagtgcgccgccggcctcgctgccgagagctgcaacatctgtccggttgagggaggcaactttttccatcgccgccgcggtactttcgcagtattcaattttgcgatccgggaattggctgagatactggctgcactgctcaaacggctgcggatggctgtaaagggtggtgatcccggcaatatccgcgcccggaatggtcagcagacagtgattcaccggcaggcgcaactcgccgacaatggaaagcggggtggtctgcagtaaatcatagacatcattgatggcgccggaactggtattttccagcggcagcatcccgtaatcggcctgaccgttttcaaccagctcaaaaatatcgcggaatttactgcagctgaactcggtcatatgatcgaaatgacgggcggaatactggcgggcggccacatgtgaataagaccctctcgggccgaggaaggctatccgtgcactgttatccggtgtctggttcaggtgtttttgcagaatcgcctgctgggtcaggacggaatcttcaataatcagctggaacaggcgggtgatataaaatccgtccagtccgtgcggcttgcctttgtttatcagcacatccagcagttcacgctcgcggttcttatcgcggatggggcggttatcctgtaattttgtctgtgcgacagccacggcgagctgccgccgctttgccagcagatccagcaattgtgcatccagctggctgatttgttcccgtatagctaaaagatcgttcatatgttgtcctcagaccctgtttcccggcgataaaaaaagcctccgcagcgggaggcttttctgtgcgtcttcgttttctttctcacacgacaaaaagcctcattaacagaagcgaaaaaagaaaaagaagaagcggatacggggatacatggtcagtgcgttgtccgttgtgtcatcagatgatagttaatagacctgatgcaacccgttgtgtcaaccaaaaaaaacgcgcccggagggcgcgcagagacaaaactcaatttattatattttttattctgcggattcttcatcagacacaaggttggcttctttaacactgttatccgcgcggcgcgcttcacctttgtgctgtgctttattcagctgccgttccagtttcgccagtaattcattgatggcggcgtacatatcagcgtgtttggcgctggcaactaaatttccattcggtgtgctgatggtggcatcaaccacaaatccctgcggatctttcgcgaggataatgtgcgggttaattaaaggaacctgccacttactcagcttatcgagacggttttcaacatgctcccggattgccggggtgatctccatttgcttactggtgatattcacattcatagtgacctctctttgttacatccgtcttgttgatactcagaatacgttgatggcggcaagaaaaaattgatcgccgtcactaatattttttagttttttcaaaaggttataattttgtgactcaggctgagaatacagatgatacaacttgcgggaagggactgaatcgtgcattatcgataagttggctgaccgcatattctcagagacgagaaggctgtcggccattttttatgtagtaacataatgataagacaataaaaaagccatccggagatggccttttcaatcagatgagtaaaacggaactcagtcgcgcgggttggcggcaatcagctgtgccacttttccggcttccgccgttaatcccagttcattataggcattttccatcagcggcagcgcctgacgtgtcgccagtgtgtccggataatcacgcagcattaattcaacacgattaatcaccgcgacatatgccccgcgtttcgtgtagaatttcgcaacggccagttcaaaggccgcaaggcgatctttgaggaataccagacgttttgcggagtctgttgcatagatactggtcggataataacgcagtaactggctgaaatcctggaacgccacacgcgcgttttgcgggtcacggtctgcacgatcgataccaaagaaactctgcagcatgttatcatcgagcgcctgagcggtcagaccgcgcatgtacaggacgtaatcgatgttcggatgtgtcgggttcagacgcatgaaacggtcgattgaggccagtgccatctgtaaatcacctgctttatagtaggcgtaaatcagatccagctgaacctgctgcgaatacgggccgaaaggaaaacggttatcgagggtctcaagctgcgtgatggcccctttatagttaccgtcctgtaatttttcctggccgacagtatacagctctgacggtgaggcatccgggagaatttccttgtttccggaacagccggacaacatgaggcttagcgtggcggcggccacgagatatttcatacgtatcatcacgtgttgattatcctctgaatattttttagggagcactccgtacagctcccgctggcgatcacgatacaataccacatagtttaaatgaaacggtgttaccgttcaaaatataactttctgaaacagagacaaacatggctcaagaaatacaacttaccgcaactattaatgaatcacagctcggtcagcgtttagatcaggctttggcggaattgttccctgattattcacgatcacgtataaaagagtggatcttagatgacagggttcaggttaacggccgtcttgtcaacaaaccaaaagaaaaaatgctgggcggggaacagatcagtattgatgcactgattgatgaggacatgcgttttgaaccgcaaaacctgccgctcaatatcgtttatgaagatgatgatatcctggtgattaataaaccgcgtgattttgtggtgcacccgggagcaggtaatccggacggtactgtcctgaacgcgctgctgtatcattatcctgatattgccgatgtgccgcgtgcgggtatcgttcaccgcctggataaagataccaccgggctgatggtggtggcgaaaactgtacctgcccagacacggctggtggaatcactgcaactgcgcgaaatcacccgtgaatatgaagcggtggccaatggccgtatgacagcgggcggcaaagtggaagaaccgatttcccgccacccgaccaaacgtactcatatggccgttaacccgatgggtaaaccggcggtgacacattaccgtgtgatggagcatttccgtgctcacacccgtctgcgtctgcgtctggaaaccggccgtactcaccagatccgtgtgcatatggcacatatcaatcatccgttggtgggtgatcagctctacggcggtcgtccgcgcccgctgaaaggggcaagtgatgaattccgcgatgcactgcgtgaatttgaccgccaggctctgcatgccaccatgctgcgtctttaccatccgatcaccgggattcagatggagtggcacgcgccgattccggatgatatggtgaaactgattgaagttctcaaagctgatgcacaagagcatcaggatgatatggactggtaaggagtcaccatgaccgcactgattaccccgcaatggccgctgcccgcaggtgtgagagcctgcagttcattacgtacaggcggtgtcagtcagccgccgtttgacagcctcaatctggggctgcataccggtgattccccggaggatgtcgcccgtaaccgggcgattctggcagaggcggccgggtttccggacacgccgctgtggctgaatcaggtacacggaacggatgttgccattctggatgacaacacaccgcgcggcccgcaggccgatgcggtgtatacccgcaccccggggaaggtctgtgcgatcatgacggcggattgcctgccggtactgttctgttcccgtgacgggcgcgaagtggccggtgctcacgccggctggcgcagtttatgtggtggcgtgctggaaaatacggtctcctgctttacggctgcgccgtcagacattattgcctggctggggccggccatcggcccgcagaaatttgaggtcggcgctgaagtgcgggaggcgtttatggcgcacgcggcagaagcagcttcagcatttattccgcatggtgataaatatctggcggatatttatcagctggcccgtcagcggctggcagcagccggtgtgaccgctgtttccggcggcaccgaatgcaccgtgacagattctgcccgcttcttttcttaccgccgtgatgcccgtaccggacggatggcgtcatttatctggatcaccccgccgcaaaagtcataaccttcaggattacgcataatatttaatattttttcaaaatctggcttgaatatttgacaaaagtcctcatttagtacttagctaaaattcaaagccattttttggaggtgttatgcgtttggatcgtttcacgaataaattccagcaagcgctcgccgacgcccagtctcttgcagtcgggcacagcaatcagtttattgaacccgtgcatttactgtcagcatttctgcatcaggaaggcgggtcggtgcgtccgttactggcatcagccggggcggatattgcgcagcttaatcagaagattgatgacaccatcagtcgtttaccgcaggtggaaggttccgccggggatgtgcaaccctctcaggatttaatccgtcacctgaatatatgtgaccagattgcacaaaaacaaaatgatgcttacatcgcatccgaaatttttgttctggctgtattagagagcaacagctcattagcagatgtattaaaagcagccggaattaataaacaaacacttaagaaggctatagacattatgcgtggtggtgagaatgtgaatgaccagggcgcggaagatcaacgccaggccctgaagaaatatacgattgatttaactgagcgcgccgaatccggcaaactcgacccggttatcggccgtgatgaagagatccgccggactatccaggtcttacagcgcagaaccaaaaacaacccggtactgatcggggagcccggggtgggtaaaaccgccatcgtggaaggactggcgcagcgtatcgtcaacggcgaagtcccggaaggactgaaaaataaacgcgtgctgtctctggatctcggtgcgctgctggctggtgccaaataccgcggtgatttcgaggagcgtctgaaagccgttctgaatgaattatccaaagaagaaggcagtgtcatcctctttattgatgagctgcataccatggtcggcgcaggtaaagcggatggcgcaatggacgccgggaacatgctgaaaccggcactggcccgtggtgaactgcactgtgtgggcgcaaccacactggatgaataccgccagtatatagagaaagatgcggcattagagcgccgtttccagaaagtctatgtggcagagccgacagtggaagacaccattgcgattctgcgtggtctgaaagagcggtatgaactgcatcaccatgtgcagataaccgacccggcgattgtcgcggcggcaacgttatctcaccgctatatcacggatcgtatgttaccggataaagcgattgacctgattgatgaagcaggtgcaagtctgcgtatgcagatggattccaaaccggaatccctcgacagactggatcgccgtatcattcagttaaaactggaacagcaggcactgaaaaaagagtctgatgatgccagtaaaaaacggcttgatatgctggagcaggaactgaccgagaaagagcgcgagtatgcgtctctggaagaagagtggaaagcggagaaagcaacgctgtccggtacccagcacatcaaagcagaactggagcaggcaaaaacggcactggagcaggcacgccgtaccggtgatctgaccaaaatgtcagaattacagtacggtaaaattccggagctggaaaaacagctggcagcagccaatgcggcagaagataaagagatgaaactgctgcgtaataaagtcactgatgtggaaatcgctgagatcctggcgcgctggaccggtattccggtatcccgcatgctggaaggcgagcgtgaaaaactgctgcgcatggagcaggtgatgcacagccgtgtgatcggccaggatgaagcagttgacgcggtagccaatgctatccgccgcagccgtgccgggttatcggatccgaaccgtccgattggttcgttcctgttcctcggaccgaccggggtgggtaaaaccgagctgtgtaaagcgctggctgatttcctgttcgacagcgatgacgcgatggtgcgtatcgatatgtccgagtttatggaaaaacactctgtggcacggcttatcggggcacctccgggatatgtagggtatgaagagggcggttatctgaccgaagcggtccgccgtcgtccttattccgtcattctgctggatgaagtggaaaaagcgcatccggatgtcttcaacatcttattacaggtgctggatgacggacggctgactgacgggcaggggcgcactgtggacttccgtaacacggtcgtgattatgacctctaacctggggtctgaccggattcaggaacactttggtgaactgaattacgatgcaatgaaaggcgcggtcatggaagtggtttctcatcacttcagaccggaattcatcaaccgtattgatgaagtggtggtattccatccgctggcgaaagagcagatccacgcgattgcgaaaattcagctcaaacgcctgtacaaacgtctggaagagcacggctatcaggtcacgattactgatagtgcgctggataaactggcagaagccggattcgacccggtattcggggcacgtccgctgaaacgggctattcagcaggagatcgaaaacccgatggcgcaggcgatgctgtccggcaaactgattccgggcaaaatgatcactctggatttaaccgatggtgtgatcaccgcgaaacagtaataacagaagaaagcaaaacagaggggtgcgaaagcgccccttttttgtgcataatgcacaggaaatcagcgataccttatgtgtttgcccggtttttgagcaaacagaaaaaaagttgaaataaacacttgcgtgatctcagcgagtgtctataatgcgccctcactgacacggagcaacacgctgagaagcgcgccgacagtagaggaaagcgaaaaaagttgaaaaacaacgcttgactcgaaggggctggaaacgtaatatacgcagcctcgcaacaacgcagaagaccggcaacggcagcgaaggttgcaactgctctttaacaatttatcagacaatctgtgtgggcactcgcaggacatatcacaaaaaatattatttttgagaagtcttgaagagtgaccaatacagcagcttagtaataagcagcagtaaacagtttaattctttgagcatcagacacttttaattgaagagtttgatcatggctcagattgaacgctggcggcaggcctaacacatgcaagtcgggcggtaacagggggaagcttgcttctctgctgacgagcggcggacgggtgagtaatgtatggggatctgcctgatggagggggataactactggaaacggtagctaataccgcataatgtcttcggaccaaagcgggggacctcagggcctcgcgccatcagatgaacccatatgggattagctagtaggtgaggtaacggcttacctaggcgacgatccctagctggtctgagaggatgatcagccacactgggactgagacacggcccagactcctacgggaggcagcagtggggaatattgcacaatgggcgcaagcctgatgcagccatgccgcgtgtatgaagaaggccttcgggttgtaaagtactttcagtcgggaggaaggtgtcaaggttaataaccttggcaattgacgttaccgacagaagaagcaccggctaactccgtgccagcagccgcggtaatacggagggtgcaagcgttaatcggaattactgggcgtaaagcgcacgcaggcggttgattgagtcagatgtgaaatccccgggcttaacccgggaattgcatctgatactggtcagctagagtcttgtagaggggggtagaattccatgtgtagcggtgaaatgcgtagagatgtggaggaataccggtggcgaaggcggccccctggacaaagactgacgctcaggtgcgaaagcgtggggagcaaacaggattagataccctggtagtccacgctgtaaacgatgtcgacttggaggttgtgcccttgaggcgtggcttccggagctaacgcgttaagtcgaccgcctggggagtacggccgcaaggttaaaactcaaatgaattgacgggggcccgcacaagcggtggagcatgtggtttaattcgatgcaacgcgaagaaccttacctactcttgacatccagagaacttagcagagatgctttggtgccttcgggaactctgagacaggtgctgcatggctgtcgtcagctcgtgttgtgaaatgttgggttaagtcccgcaacgagcgcaacccttatcctttgttgccagcgcgtgatggcgggaactcaaaggagactgccggtgataaaccggaggaaggtggggatgacgtcaagtcatcatggcccttacgagtagggctacacacgtgctacaatggcgtatacaaagggaagcgaccccgcgagggcaagcggaactcataaagtacgtcgtagtccggattggagtctgcaactcgactccatgaagtcggaatcgctagtaatcgtagatcagaatgctacggtgaatacgttcccgggccttgtacacaccgcccgtcacaccatgggagtgggttgcaaaagaagtaggtagcttaacctccgggagggcgcttaccactttgtgattcatgactggggtgaagtcgtaacaaggtaaccgtaggggaacctgcggttggatcacctccttacctggttgatacagaatgtgagtgttcacacagattgtctgatagaaagaagcagataccgggaataggcttgtagctcaggtggttagagcgcacccctgataagggtgaggtcggtggttcaagtccactcaggcctaccaaaaccgaattgatactgcgttatgaaaagactcgtttaccttagtaaacttcgcctttccatgccttgtctcaatgcggtttcctcttttcatgatgaaaagacacgcccgggaaaaccaaataatggggctatagctcagctgggagagcgcctgccttgcacgcaggaggtcagcggttcgatcccgcttagctccaccattatctgatatctgaaaaataattcagagtttaccggaaacggtatactgtgaattattatgctctttaacaatccggaacaagctgaaaaattgaaacaatcaatattatcaccgaggtaatattgatgagtctctcagccgaacaacacgaaaatgtgaagacgtttttgcgtgagttatgagcgagcagtcctcagttcgcgaaggacggagcacagcaagcggagcatacatcagtatgtgagtattgcgagcaccgcccgacaaagaaatgaggggcgcgcagccataaccccacagaaacactcagtcgaaacaccttcgggttgtgaggttaagcgaataagcgtacacggtggatgcctaggcagtcagaggcgatgaaggacgtgctaatctgcgataagcgccggtaaggtgatatgaaccgttataaccggcgatttccgaatggggaaacccagtgcaattcgttgcactatcattacctgaatacatagggtaatgaagcgaaccgggagaactgaaacatctaagtaccccgaggaaaagaaatcaaacgagattcccccagtagcggcgagcgaacggggagcagcccagaaccttaatcactatcagcatcaggagaacagtctggaaaggctggccgcagcaggtgatagccctgtatccgaaggtgttggtagtgtgagttcgatgagtaaggcgggacacgtgttatcctgtctgaatatggggggaccatcctccaaggctaaatactcctgactgaccgatagtgaaccagtaccgtgagggaaaggcgaaaagaaccccggcgaggggagtgaaaaagaacctgaaaccgtgtacgtacaagcagtgggagcacccttcggggtgtgactgcgtaccttttgtataatgggtcagcgacttatattctgtagcaaggttaaccgaataggggagccgcagggaaaccgagtcttaactgggcgaattagttgcagggtatagacccgaaacccggtgatctagccatgggcaggttgaaggttgggtaacactaactggaggaccgaaccgactaatgttgaaaaattagcggatgacttgtggctgggggtgaaaggccaatcaaaccgggagatagctggttctccccgaaagctatttaggtagcgcctcgtgaattcatctccgggggtagagcactgtttcggctagggggtcatcccgacttaccaacccgatgcaaactgcgaataccggagaatgttatcacgggagacacacggcgggtgctaacgttcgtcgtgaagagggaaacaacccagaccgccggctaaggtcccaaagtcataattaagtgggaaacgaagtgggaaggctcagacagccaggatgttggcttagaagcagccatcatttaaagaaagcgtaatagctcactggtcgagtcggcctgcgcggaagatgtaacggggctaaattatgcaccgaagccgcggcagcgatatgtaaatattgttgggtaggggagcgttctgtaagcctgtgaaggtggcctgtgagggttgctggaggtatcagaagtgcgaatgctgacataagtaacgataatgcgggtgaaaaacccgcacgccggaagaccaagggttcctgtccaacgttaatcggggcagggtgagtcgacccctaaggcgaggctgaaaagcgtagtcgatgggcaacgggttaatattcccgtactggtggtaactgcgaaggggggacggagaaagctaaatcatccgggcgacggttgtcccggtttaagcgtgcaggtggactgaccaggcaaatccggtcggttgttaacactgaggcgtgacgacgagccactacggtggtgaagtgattgatgctctgcttccgggaaaagcctctaagctccaggttaccattaatcgtaccccaaaccgacacaggtggtcaggtagagaatactcaggcgcttgagagaactcgggtgaaggaactaggcaaaatggtgccgtaacttcgggagaaggcacgctggcattaggtgaagtggtttacccacggagctgaagccagccgcagataccagctggctgcaactgtttattaaaaacacagcactgtgcaaacacgaaagtggacgtatacggtgtgacgcctgcccggtgccggaaggttaattgatgaggtcagccgcaaggcgaagcttctgatcgaagccccggtaaacggcggccgtaactataacggtcctaaggtagcgaaattccttgtcgggtaagttccgacctgcacgaatggcgtaatgatggccaggctgtctccacccgagactcagtgaaattgaactcgctgtgaagatgcagtgtacccgcggcaagacggaaagaccccgtgaacctttactatagcttgacactgaacattgagccttgatgtgtaggataggtgggaggcaangaagtgtggacgccagtctgcacggagccatccttgaaataccaccctttaacgtttgatgttctaacccgggtccataatctggatcggggaccgtgtctggtgggtagtttgactggggcggtctcctcccaaagagtaacggaggagcacgaaggttggctaagcatggtcggacatcatgcggttagtgcaaaggcataagccagcttgactgcgagagtgacggctcgagcaggtacgaaagtaggtcttagtgatccggtggttctgaatggaagggccatcgctcaacggataaaaggtactccggggataacaggctgataccgcccaagagttcatatcgacggcggtgtttggcacctcgatgtcggctcatcacatcctggggctgaagtaggtcccaagggtatggctgttcgccatttaaagtggtacgcgagctgggtttagaacgtcgtgagacagttcggtccctatctgccgtgggcgctggaagattgagaggggttgctcctagtacgagaggaccggagtgaacgcaccactggtgtacgggttgtgatgccaattgcattgcccggtagctaagtgcggaagagataaccgctgaaagcatctaagcgggaaacttgcctcgagatgagtcttccctgaccctttaagggtcctgaaggaacgtttgagactaagacgttgataggctgggtgtgtaagcgcagcgatgcgttgagctgaccagtactaatgaaccgnaatgaatttgcctggcggccgtagcgcggtggtcccacctgaccccatgccgaactcagaagtgaaacgccgtagcgccgatggtagtgtggggtctccccatgtgagagtagggaaccgccaggttattattaagtgaagaagccaccctttgggtggcttttttgcgtttgggcgaaaagaaaaatggcgaaatgtgtggtcatttaccggatgaaaaattaacagtcggtaatttcgggtttaactacaggtaatactctgcacctgaatagatcataatgagtcaatggtgagaaatcacaccctatatatatcgctgtcattctcctgaaatgttccgaatccctcgaatacaatctaaattctctcctttccggacacgagctacgtgcttttttaagctataagacaggctgattttgcttctttagggcactgtgcgacaaaaatgaaatattaaaaaagccactgcgtgcctgatgcagactttctgaacaattccgggtaaccgggaaactcagaacgcattatcctgtggtcacactttgccggggtcggggctcatcgctgcagttgcaaataccggaaaaacggtcctgacaagtcggatggctgacgggctatattacgcagtcaggtacaggaactgcataacatcagtcatggaaagagacttcggatgaagatgaccgggtgacagacatcaccttacgcgtcagtccgcagtaacactacccgatcagatatggtgacgtgacgtatatccggacaactgactgcccatcaaagagccggaaatattaccggaatctttcgtactggcaacagaaggtggcagaacagtgaggttaatcattcaggagcgggtgaaagatctatagaaaagggtttcatgataaacatgaaaccctttctgttccggccatcgggtctttaaatggcctgaattaactgtaacgcagatttttagcctctgatcatggatcagaagttataacggataccaatctgtccgttgattggtgaataaactgcatcaccggcaatgtgctgtaatttcatgaatatattcacgttgttatagcgggcattgaaaccggcaccgaatttaccggtactgccggataaatccaggttaatggtgttgtaacggttaaattcaacttcgttaccgtcttcatactgatgattccacgccgctttcacatacggagagaacaccaggccgttatcaaagctgaagtctttaccggcattgacacccagttcgctggtaaatgaagtctggctcttgattgctgcatccataccattattcagggtgatatctttactgcccatacggttatacgctaactgtccgtaaggtgtgataaagatctgattactgaaggtaaaggtataaccggtttccagcgccatcccccagacagaggtggagtaattgtcgctgctgacatcataaccgttagtgaatgttgtcttcagtttattatcaaagtggttatatttcagtaatgcatccgcataccagccgttgctgttcagataagtggcataggcaccgaaggtatagctgtcgatatcactggtacctgcccggtcatttttgacatcacctttatcaaatccggtgaaaccacccagaaccagtttgctgtcactgtttaacgctaactgataatccgcacccagttccagaccggcgtgtctgagtttgtactgaatctgatccttatccactttggtattgctgccgataccctgcatccagagaccgttctcaatactgtcgctggtacgcagcatatgcagacgtgcacgcagatgatcaacttcgttgttgtacatcagctgcggcgcactggacagtgcgagtaccgcacgggcacttggtgtcaggcgatcggttgcagtgaatgaccatgtggtgtcattatcggcaccggtacgggtctgaatattatgaatgtaagtaccggcatccatcaggttgaggattttgccgtccgcatccttcataccaaagaccgcattgctgtcaccggccacgtttttcacatatgcgaaatcagcagactgagggcgattcagaacggcttctttaccggtgccccgctcaatgatggtgacatagtgctgaccataagcattatcagtattgataaagtcagaattaccattgaggatattgctgttcatggtgaaatctaacgtggtgttatcatactgcgccggatcattgttacccagattattgatattcatctgagtatggcctgccggattggtccggtggtcaaaattcaccgctgctttaccgtttaaggtaccgatagtgacggcatcgtgttcctgagtgccttcataaacggtgacggagcttttgcctttggtctggctcagagcaagatcttccacatacgcaccattggtggtggccgcatacagatgcagatggtttttgccgttaaaagtagttttgccggtcgctttaccattggcctcaacaatcatatcgatatcaccgttgagggtgttatttttcgcttcaccgccattttcaacggttaagtgagaattgccggtctgggtgttatcggtggccaggccgcctttcttaacaatctgattggtattggtcagtttgttattgttggcggtaccgctgataacctgctcgccacgtttatccgctttgttggtgatggtattgttttctgcaagaccatccacatactgactgccgttggtaatgtcatttttaataccggcagtaccgtttttgccgacaacctgcttaccgcggttagtggctttgttagtgatggtattattttctgcaaaaccatccacaaactggttgccgtcggtaatgtcattcttaacggaggcgataccgtctttttcaacacgctggtcagtgttgctcagggtgttatcttccgctttaccgcgtacaacctggataccgtgctcagcaccggcattatcgataacatttttaacggtaacgccggttttttcaatgatctgatcggcatttttcagtgtgttgtcagttgctgtgccgctgactaactgaaggccgtgtgtgccggtggtattatcgatactgtttgtggtggctttgccgctgacagtctgattaccgttggtgattttagtgttatccgcttcaccgctgacattctggtcaccgttacggagggtgttatttttggcaacaccaccggaagagatatcctgattagcgtaatcaaaggtggagtcgatcgccaggccattactgccgacagtctgaccggtatgttttacaccggcagtaccggtaaaggttgcatcaagggatacggcttttttgccgtctttaccttgaggtgttgtgagctttgtccgttaaacgttgcaccttgtgacagtgaattttcaccgacatgctgttccgctttgccgttaaaagtatcaccggtggcaaccaggtattcacctttatctgcgcctaaacgggcatcagtaacatcggtgcctttgatggttaatgttgcattgctgttgtctggttttttgacatcaccaatatgttcgccatctaaatattgtttggattcatcattgtaagtaccgttcccggtgctgacagtgatttcatcccggcggttattgtcataaccgttacgatacagcggcagtgttgactgagggtttgacgggttctcatagtctgcaccgcgatacttattataggcgtcactgccggtaatagtgacaactgatttaccaccgacggttaaattatcagctttaccgttgatacggacactggaatctgtaatcgccagggtgtcgatttctacagcagaataaaagtattcatagtcatagttgacaccgatccgggtaagagagccatcattttccgttctgtaggaataatacatatctccttcccgctcagattcacgaccgacaaatgtggttgtgttcgggctattaatgatgctgcctgtatatttgatggtatcgttaatatgtctgtctccggtgataaccgggccgggaatgttattgtttatttgaatggttttatcgatagtagccgctactcccgcagatacggaaagcgcactaactaccaatacggtaatttgcgaaagtttaaatttcataatagtggcctgtgttcggaataaaggtgaatgggaaaagatcctaatacctattgttatcaggtaattatagggtgtttactacgcaggaaataagggggggctattgcgggtatctaatggtatgaatatgttcttattttatttttactatgggtatttgcacttagacatattattttcatccttacttatccggattttgggttgtagttattatcaaattaataatgaaaatgccattttcattccggtttattttacgtaatattaattttaagctatgttgtttaaataaggaataaggagaaatagcactatttaaatcgaaaggttattaaaatttaaattgccgggtctgatgccattgcggaaaattaaccggaatgaatcattttttgcatgtgatgttgctcacaaaatttacactgcccggtcaccggatttttatttcagcgattggtacacactgtaaccggcaacggcgccggcgatatcccagacgaaatctttcacactccagccggtaccgcccgggcggctgtcataaaactctttcgcggctcccagcgcaacagaaaaaccgataccgaattgtgcactgtgccggtgctgccagttctggtgatcgccataagcattagcggcaattgcggttgcagctgaaaaggcgaaatgctgggctttatcccgtccggtccagctgtcattagcaaggcgcatcgaacagccggaactcagcagcaggcagaaagacactgtcatgcaggtacgtaatgtaacgggcatactcattctccgggaaacagataaaaaaatcccggcgggtgccgggaggtttatatcagaggatccggcttatcaggcgatcaagacggacgcggcgcagacggcgcagcagttttttgatcttgaccggatagtcacggatattatccagctcagtatagctgcggataatggttgtgttggtgcggatattggccagctcttcctgacgctgtgcgtgcagctcctgtttcgggtcacggataaggatcgcattttccagatccaggccccaggcgcgcgggttcaggttattaccggtgatcagctgccactgattgtccacccacatccctttcaggtgataggtgttgtcgtcatctttccacaggcggatggtcagttgctcactgtcggagaaccgctgcagacgttgcataaagcggcgcagattgatttcatacagataaggcagcccgccgataattttgaacggttcttccggcggaatatagaaatcattggcggttttatcgccgataatgatttccacctgtttcccgtcccgcagcaggcggctgataatgcgcaccagtgttgacggcagattgaaatacggcgtgcagataaccactttttcctgtgcggaacacatcaggtgctcaatggtgttattgagcatgttctttttcccgagaccaatcagcggcgtcacggccagctgatcatcaggcagtgcctgcggggtgaagtggtatgcggcatggcgcagtttcaggcggaaatcgcggatcaggtttttgatctccggcgttttcacgcgggtttcggtatcgagtttctgtaccgccggttccggcagcagcatttcatcaataaacagtttcattgccgccgccagttccggattacgcaggaagtggtagcggtcataacggtatttatcatgctgatacagatagacattattgacgctggcaccgctgtaaataacggtatcgtcaataataaaacctttcagatgcagaacacccagcgcttcgcgggtatttaccggcacaccgaagatagggataagcaggtcagggtgagatgccgcgacggaatgataccagtcggcattggtggcattcgcttctgcaccgatacgcccgcgctgtgcgcggtgccagtcaacaaagactttgatatccagttccggattggcttttttggcggcatacagcgcgtcaaggaaatcccggcccgcatcatcgtgctcaatatataacgcagaaatataaacggttttctttgcaccggcgatttctgccagcagacggcctttaaagtcgcgggtatggaacagcgtttcaacatcatccgcagactgtgctaacttcggcagttgtgcaaggtgctgttggtgtttcgcggatttgaattttgacaacatcacagtgcgaattatctctttagttataggcggcggttacggaataaacaggtaccgggccggtaatgaaaagatgaacagatcaaaggattatatcaccagtttgtctgattgtgcgcagcaattcactttctgcttaagtgacggttaagtctgtgtcatatatcacgttgtccgtttttgactattgcactgccgcaatttcagaattcaggtgaagtgtcaggttgacgatgccatcctcaaactgtgtttcgacggtaaacccgagctttttcgccagttggatcatattacggttctccggcatggtgatggcggtcagcaggaggataccgcgtgactttgtgtaggcgagcagtttgcacatcagctgataacccagagtattgcctttcatatctgaccgcaccagcactgcaaattccgcttcccggttatccggatccgacatcgcacgggcaaccccgataatctgaccgccgctgtccaccgccacaaaggccatttcgcggtcataatcaatctgggtcatttttgccaggtcgtcatgggtaaattcactgatctcactgaaataacggtaataaagatcttctttggtcacgcggtcaataaaggctttcagcaggggttcgtcttccggcaggatagggcggacatgcacaaccgcgccgtcttttaactgaaaattttcctccagttctgccggatacgggcggatagccagacgctgacggccgtcaccggctgccggtgccagagtcatcgtggcatccaggacagtaaattccgtaccggaggcgagcagcgggtgcaaatcgagtgtcaccacctgcgggcagtcaattatcaggttggacacctgtaccagcactctgctcagacccgcaatatccagcggattcagggcgctgccggccgccagtttgttatttttaatggcgtgaatcaccagataacgggcaagcgccatattgagcggcggcagggcaacggcggccggggattcatcatcccacgggcggctggcatcccccagcataatcaccgggccgaaaaccgcatcctgggtcacggcaatccgcagttcctgtgccccggcgcggttcgccattgactgcacaatcagcccgtctatctgcgcatcaggaaagttttgtgtcacgcggtcaataatcgctgctgctgaggtggcgacttcctgtttatcccgcagataaagcatcacgccctgcacatcggatttatgtgcgatatccggtgagcgcagtttcagcgccaccgggtaacccagtgtttcggcaatggtaacggcatcatccgcagaatgggcaatccaggtcggcagaatgttcagcccgtaagcatccagcaccggctcgacttcataggtatccagaacagtgtgctgacggcgcagagcgctgtctatgcagtgatgagcctgctgccggttggcggtcagtccttcggacagagcgggagtttccgccagttgtttctggttgcggcggaattccaccatatgcataaaagcggtcacagcaccttccggtgtgcggtaagtggggatccccgcctcgccgaacaggcggcgggcttcctgtgaggaatattccccgctccagttggtgaaaattgtcagccagcggctgcgcgggtgctgtgcgatcgcggcaataatccgggcggcggtttctttgcccggtgcaatggcactcggggagtggaggatcagcagggcatcatgatcgtggctgccgagcagaatgttcagggtggcgatatagcgatccaccgtggcgtcatcgcgcagatccagcggattattgatcacaaaatcatccggcaataccgccgcgagtgcggcgctgctctcatcactgagaccggcaattttcccccggcggcggaacagttcgtccagcgccattgctgccggtgccgcgccgttgctcataatggcgagacgttcaccgcgcagcggcttcataaaggtcagggtttccacggcggaaaacatctcgtgggtatcctgcacccgcagcagaccggcgcgctggattgccgcatcataggcgatatccaggctcggcgtttcaccgaccagtaattgtgtgcgctgcgtgcggccgcttttgaccaccaggatcggtttattgcgggaggcactgcgggcggcggacataaagcgccgcgcatcatgaatatgttcgagatagagcagaatggcgctggttttgctgtcgcgggccaggaaatcgagcatatcgtcgatatcaatatccgcgctgctgccgagtgcgataaagtaggaaaaaccggtttcccgctgttgtgcccagtccagaatggtgttggaaacggcggcggactgggaaataaacgccagtttgcctttgagcaccggtaccggggaaaagctggcattcagcccctgccagggcgcaagcaaccccagactgttcgggccgagcaggcggatattatagtgctgacaggtctgtttcagctcagtagtctgtgatgccggggcggagagaataatcaccgcacggcagccgagttcaccgagttcattcagcagggcaatattacgtttggggtgggtgcagataatggccagatccggcaccagcggcagatccgcgacagacggatatgccagtaccccttgcactgagcggcgtgacggcgtgaccggcagaaccggtccggcaaaaccgccgctgagcagattgctcatcatccgggaacccgcccggttgggcttttcggatgcaccgataaccgcaatggattgaggccggagtaatgcttcaaggccgcgctgactcatggtgttctcctcagaccggattcccgtgtgctttaatttagcctaaaagcagctcctctgctctgatttgtgccaccggaagatgtgacttacccttcaaatactgacggcggaagcaggtgaagtgatccagaagctgttttccggccgcggtatcacccgccatcatcagtgccgcagcggccacttcggcggtacagtgctgatcttcccgtgccgcaacccgcagcagataatctttctgcgccagatcgttgatggagagcagcggaatgttatcgagatacgggcttttacggaacattttgcgtgcttccggccaggtaccgtcgagcagaataaacagcggcggctttgtattttccggcacatcactgaacacctgacgcggcggagtggcatacgcctgcgggaaaatcaggtacggctggcgggtgtcatctttcagcagcgtgagcagggcctcgtccggttcggtacgcgaccacagaaaagcctgtgtgtccggcaggacatcggcgataagcttcccggtattgctgggtttgagcggttcggtatcatacatcagcaggcagaactgactgcgtgcatcccgggtctgtatggtgtcacacagacagtttttttcgggtaataagcagtaattacaacggactacacgacatccccgggcacggaaaacacgggtggattgtgccagacgccgctggcgtaactggtaaacagaattggtcttcatttttatcggctggtttcacaaaaaacagtatgcattgtactgttaacgctgcacaatagcatgatttttcgcgggggcgcctgagttcagtgcctccggcgggggcggccggtgatcataaccggcaggtccggacgatatcgggtaatcttcgcccccggaaatggcgtgggagaaacacatgaacgactctttaaatggtaaaaacggcaaagtgaaagtaatgtatgtccgcagtgaggacaaacaggacgatcagaaaaaatcagacagacgcggtggccggggatcagatcgcggcgaccgtaacagccgcggcccgcgcagggatcgcaatgaacgcagcaatcgcggagaacgcagtgaccgtggtgatcgcggcgaacgcagaggtcagggaagttattccgatgacagtcgttcaccgtggaaaaccgtatcccgtcagccgtcagaagacggagaggggctgatcccggatcacggcggtatcagcggcaaaagccagatcgacccggcacagctgcgccgtcagcgtcaggaagaaacccgtatttacggggaaaatgcctgtcaggccatgttccgcagccgtccggagcgcattgtgcgcgcctggtttgttcagtcagtgacaccacgtttccgcgatgccctgaaatggctggcagcgaaccgcaaagcctatcatgtggtggatgaggaagagctggccaaagcatccggtaccgaacaccacggcggtgtctgcttcctgattaaaaagcgcggcggtgtgagtgcggaaacctatctggaaaccgccggtgagcaggattgcgtgctggcgctggaaaacgtcggtaacccgcataacctcggcggtattatgcgcagctgtgctcacttcggtgtcaacggtgtgatccttcaggatgcctctgtgctggaatccggtgcggctgtccgcacagcggaaggcggtgccgagcatctggtcgggattgatgccgatggtctgacggatacgctggatttattccgcaaaaaagggtacgccatcgtcaccacctccagccacaaaggcagcaccgatctggcgaaagccacactgcctgcaaaaatggtactggttctgggtgaagagagtgacggcctgagtgacgcggtctgggaaggcggggatatgcgcctgtcagtcggcggtaccggtaatgtcgaaagcctgaacgtgtccgttgcgaccgggattatcctggcacgctggtggcagcagaataaagtcagctgataccggctgattatgattaataaaacccggcgtttgccgggtttttaattaatgatgttcatgaatgttttttctgaaataaatatctcccgttatattcacctgtctgtcagcacgccagtcataacggctgtacggggatagatgctgttaatgtcagatattataaaaaaaccatgccggagcatggtgcaaaaatgtgcattaaaaataaaaattatggcaaacagcattaataatgctaaatcatgctcacactcctttgtgaatataatattgataattatccgtgatattaattccgcaaccggaaagtgtattttcctgcggtgaaataagaatagcaatttgatgattttaatagcaagtgattattctgttaataagtttttgttttattattgtttaattaatttgtagataaatatattttatttttatattaagcacatcaataaaaataaaggcaccgcagtgcccttattttcttatttaatgtgcaccaccgccgccgccaccggcagtaaacggtggtttggcaaaccagaccagcagcatcagcaccaggaagacaccggcagagagccagaaaatctcgttcgcagagataatcagcccctggtcggtgatcacttttgcgatataggccgatgattgctgctgcgacatccccatttcacccagcgtgtgatacatctgctgtgtatccgggctgaacgggttgatatgctcggcaaaattggcgtgatgcatggactcccgctgtgtccacatcgtggtggtgatcgatgttccgatagcgccggccagtgtccgcgtaaagtttgacaggctggatgccgacgccattttctccggcggcaggccggaaagcgtaatggtggtcagcggcataaagaaacaggcgattgccagcccctgtacaaactgcggccaggctgcggcggcaaagtccattcccggctcaaacgtataggcccgccagtagaaacagacggtatacataatgaagctgaatgtcacaatgatccggtaatccactttatgagcatatttgccgataagcggtgtgatcagcagcggcagaataccgaccggcgcggaagccagtcccgcccaggtggcagtgtagccgaataccccctgcaacagctgcggcagcagaacaatggtgccgaaatagagcatataagccagactgaggctgaggcaacctattgtgaagttcctgctcttaaacagagacaggtccaccacggggtgatcatccgtcagctcccagacgatcaggaaggcgatggcaaccacagctatcacggtcaggacaataatctccgtcgagttaaaccagtccagctctttgccctggtcgagcataatctgcagacaaccaacccccaccaccagcaggatcagcccgacagtatcaatcggacggatttccgttttggtttcccggccctccagggtttttgcggtcagcatcatgatcacaatcccgaacggcacgttgatgaagaaaatccagccccagtgatagttgtcactgatatagccgccgaggataggcccgcagatcggcgcgataacaatggtgactgaccagagtgccagcgccatagtgcgttttgcgggaggatagttattgagcagcagactctgtgacagcgggatcagcggcccggccaccagaccctggatcacgcggaagaaaatcagcatgcccaggctgttggaaataccgcataaccaggaggagatggcaaacagcgctgttgaccacataaacagacgcacttcgccgatccgcttggccagccagccggtgatcgggatggagatggcattcgccaccccgaatgaggtaatcacccaggttccctgagagttagaagaacccaggttaccggcgatcgtcgggatcgccacgttggcgatagtggagtcgagcacctgcatgaaggtcgccagtgacagggcgatagtcatccaggccagtcttgctccggtcagtggcgcctgcataaccctgaccccttactgaccggcattgcggctgataatctcagcgatcatctgatccgccggttgcatatcaatgctcagggcactggtatgataggccggatcggtgcgcacgcttttcgacagcaccgggccgtcagtattctgtgtgtccaccgtgacatcaccggaaagaccgatacgcagcgggtatttctccagctgtgccggatccagcgcgatacgcaccggcagacgctgtactactttgatccagttaccgctggcattctgcgcaggcagcagggagaaggcgctgccggtgcccatgtccagcccggtaacggtaccggtgaagaccactttgtcgccgtagaaatcagtaaccactttggccggctgcccgatacgcatggcgctcagttgggtttctttaaagttggcgtcaatccacataccggtggccggaaccacggccatcagcggggtagcaggggtgatttgtgcaccgacctgcacactgcgccgggagacataaccgtccaccggactgcggatatcggtccgctccagtgccagccaggcgttacgcacttcagtggctgcctgtttcactgccggctgttcgctcagcggggtatcgaggatcacggctttgttggcattaaactgctcggtggcaacatccagctgcgctttggcgctcaccacggcttcacgggcgtgctgaagttcttctttgccgatcacattctgtgcgcccagtacttcacgacggcgcaggtcattctgcaggcgggtcagttctgaacggcggacttcaataccggccagcaactgacggctgttgatcatctgctgatgtgtctggcggacactgtttgccagcgcaacctgtgctttttccagcgccagtccggcatcccgtttatcgagctgcaccagcagtgttccggcggtcacataatcggtattatccacactgacagtggtgacactgccgggaacctgtgacatcacaatcacctggttgccggtgacataggcgttatcggtcgattcatggtggcggagcaccataaaccagtaaacggtgtaagccgcacccagtaatacaaacagtaatgtcagtaacatcagcgcattacggcgttgtcgttttttgttacggactgggggctggacagcctgagtttcctcactgacactcatcagttatctccggatattgttctttttttaaggtgttgcatgacataaccgcaacaaagacaggcttgctattgtcgtcactgtgataaacgacaaccgcaagcccggatggtcagcacatcaattgatggcagaaatgtcagcctgtgaaggataaaggatccgggccaacagaaaaggtttttttacatctgcttattgagaaaagctcttattcattaaccttaaacaataaaaggttatttagttgtcgctcttatcgagctgaataagcagtttgcgcatcagcttttccaggtttttctgttcatcttcggccagtgctgaccagatatgacgcaatgcatcatgctgaggcggcagcagactgtgcagaaaatctgagcctttctctgtcaggtgcagatgcagacagcggcggtcattgtggctctctttgcgctcaatccagccgtttttctcgagttcatccgcaatgcgggtcgcattggtgcgggaagagccgagtgcggcgctgagttctgaaggctgaatgctgtgagattctttagtatccagaatcatcagtgccatgaataacgtctcattgatgccctgagatttcagcatattgttgcgtttttctaataatttactctgaacgtgcattgaaagccgggtcagtaaaatttcctgatacggcagatcggcacccagattcttctgttgtgagatccggctgttaagcaattcttctgtcggtgtaaatgaactttccattattgagataccttattagtttctgttggtatgttaacccggctatgacccggtgaaatgaccggccaaaagattaatttaacaattatagcaggttaatatcactacatttcttttgataatgccacctgattcataaattttatgaatgttagtcacaaatatcacttattatttagcaaatcacttacattttcattaccgggcggctgactctgattatgcgtaatttttgcttcataaattacgtcaatttttattagtgaaccatgataatgaagaatatcaaatgaccttcattgccgttatggcagtgattatcgctgtggtatctattttacgtggtcaaaaattattttctttgattaacagtgttatttgtaacttttaacgaaggaataatccacaggtggtagattattatgcgatgtttgttggatttttgagtggaaaaagcacccgaaggtgctttttccggaggaatcaggtgtgtgatggctgctgacgggtaggcgtttcatcagactgcggtacatcatacttcttcccggcaagccagatcaccagtcccagggcactgactgccgcgccgctgtaacagacgccatcccagccatagtggctgtaggcatagccggacagcagtgaaccgaatgcgccgccgcagaaatagcaggtcatataaccggcggtcagacggctgcgtgcctccggcatcatccggtagagggtactctgattggtgacatgcaccgcctgtaccgccagatccagtaccaccaccccggccacaaaggctgcgacagaataaccgctcagcgccagcgggatccacgagagcagaagcagcagcagaccggcgctggtggtcaggcggcctttgcctttatcggcaaaacgcccggccgggcctgccatcagggcaccggcggcaccggcgaggccgaacagcccgatagtgctctcggaataattaaacggatccgatgccagcaggaaggccatagacgtccagagcaggccgaacgcggcaaacacaatggcaccgagtgccgcccggacacgcagaaccggagtgcggacaaacagcaccacaatggaggccagcaactgaccgtatttcagttcagacacctgcttatactgcggcaggtgcagatacaggatcagcgccagcagaaccagcagcccggatgcagcccagtagactgtccgccagccgccgaattccgccagcacaccggcgacggtccgtgccagcaggataccgagcagcaggccgctcataataatcccgaccgccttgccgcggtgctgcggtttggcgatagtcgccgccagcggaataagaatctgcgccaccacggaaaacatcccggccagtgcggtgcccagcagcaattgccagagggtctgtgacagagcagaaatcaccagcccgatagctgacagcagtgtcatggtgacaatcaggttacggcgctcgaatttgtccccgagcggcaccagaaacatcaggccggcagcataactgagctgggcggtggtgacgataaatccggccataccggcggtaacgccgaattgtgcggcaatcgtctccagtaaaggctgtgcataatagttacttgcgactaacaacccggttgccattgccatcaggcagataagctgaggtgtcagaaccgcatcaatagttttctttttcatgattattataagattgattgagtatgaaatgattacgggtactacggagcgctactatatagaaagcagaccggaaagggtatcgattttgtgaggttgatcacgtttcgttgagggtaaaaaaaagcggccatatgactatggccgccgggaggctttttcagatccggttatttatcagcggctttgcgtgcctgttcaatccagccgtcgaattttgcctgattggctttaatccaggcattggcgtggcgttcaatatccgcctgcgagttttcgccgttatgcatgcgcaggttctgggcgttgatggccgagaccggcagtttcatgacagcgaacagctctgcggcagccgggttctgctcagcccaggctttgttggctgcgatatgcatggtgctcggcgggaagccgtagtttttaccgttcggcagtttggtgtcaattttttcgccgtccggcatggaggagaacggtacttccagccagaccacatcacgtcccggtttcagcacatcactgatccagtacggcgtccaggtatagtaaagcaccggtttgccttctttgtaacgggtgatggtgtctgccatcatcgcagcgtagttcccctggttgtgctcaacggtgtctgtcagcttataggcgttcagatggttgttgatggcggcctcacagccccagccagggttacagccggtcagatccgctttaccgttgccgttgctgtcaaacagtttggcgatttccgggtctttcagttgttcaatattggtgatgtggtatttctcagcggttttcttgtcaatcagatacccctgagcggcgttcacgacataatcccctttgcggtagaatttatcgtcacctccggccgctttgtactgggaattgtgcagcggcacccagcttactgccataaaggtggcatcaccgttggcgattgacgcataggctacgttgtaatccacttcctgaatcggctgcacgtcatagccgagttcttccagtgctttgttgacgataagggtctgaaaggtttcttcagtaatggtgctttgtacaggcagcactttgacccctttgcccggctgcgcggtgtccgcgaaagcctgagtaccaatgagtgccgataaggcgattgctgcgattgctgtcttacgcatcgttttccctcttgttgtgcctgccgccgcgataacagcggcagggtgataatgagcgggagcggaagccccctgccgtgtgttacggcgcgcggcggaacggacgggtgataagcccggctggaccggtgtgataccagcggcggccggctttgctgcgggaatctttcccgagtgattgtgtcagacggtcaagaataatggcgagaatgacaatccccgcaccgccgacagacgccagccccatgtcgaggcggccgataccgcgcagtaccatctgtcccagaccgccgacggcgatcatggaggcgataaccaccattgacagcgccagcatcagcgtctggttgatcccggccatgatggtcggcattgccagcggcagctggactttaaacagcatctgacgcggattggcaccaaaggattctgcggcttcgaccaggtcagcgggcacctgacggatcccgaggatagtcaggcggatcaccggcggcagggcgaagataatggtcaccaccacacccggcacgttaccgataccgaacagcatgacaatcggcaccagatagacgaaagccggtgttgtctgcatggcatcaagcagcggacggataaatttcgcggcgcgttcatggcgcgccagggcaataccggtcggtaacccgatgataatacagaatatcagggcggtcagaaccagtgacagagtcaccattgcttcattccatgccccgatggcaccgataaaggtcagtgataccaccgtggcaagccccagccctttgccgctcatctgccaggcaagcagggcaaagataagaatggcgatcggcgccggaatggcggtcagaccctgttcaaaggtggtgagcacaaaatcgatcggcacacggataccctgaaagaccggacggaagtgcagcacaatccagttgatggcatcggtcacccagctgtcaaacgggatcagcgagtggtcaaacgggtttgcccagtcaaaagcggggccggtatctgccggtgcggcatccagccagtcactgccgctgtccgcagcgccaccccacgggtcggcatccgcaccgccggtatcggcggtacttccccacggatcactgctgtctgcggcgtcaggggctgtttgtgctgatgaaggatccggctctgatgttgccgcccacggatccagttctgtatcctgttgattattccggctcattcggcgtctccttatctaaagcctgcagcagcatcccttttgagataaccccggcatagcggttgttgttgccgaccaccggaacagcacacggtgactgcgcgacaacggtcagcagctcattgagcggcgtgtcggcgctgaccgcctgcggctcgctcagaatggcgtctgtgataggttttttcgctttcagtgccgcctccagcgaggcaacagaaacaataccggcaaacttttgtccgcgttcaatcagatagccgtattcacggtcatcatcattgaggactttcagtgccgaacgcgggccgaagcccggcgcgacatgcagcagcgcatccgcgcggcggcgggcaatatctttggcgctgaacacatgactgatatccacaccacggaagaaggtacggacataatcattagccggattattgaggatctcatccggggtgccgacctgcaccaccacgccgccctgcataatggcgatacggtcgccgatacgcatggcctcgtcgaggtcatgggaaataaacacgatggtgcgctgtttgtcgccctggaggctcagcagctcatcctgcatctcggtgcggatcagcgggtcaagggcggagaacgcctcatccatcagcaggatatccgggtcattagccagcgcacgggcaagcccgatccgctgacgcatcccgccggacagctcatccggataagaatttgcccactgctccaggttgacctgtttcagcgcatccagtgcacggtcgtggcgttccgctttgctcatcccggccagttccaggccgaatgcggtattatcgatcaccgacatatgcggcatcagagcaaaggactgaaacaccatgctgatttttttacgccgtacctcacgcagtgcctgatcggaaatcacagcgatatcttcgccgtcaatcagcacctggccgcgggtcggttctatcaggcgattgagaagacgaactaaggtggatttccctgaaccgctcagtcccatgatgacgaatatttcgccttcttcaatggccagattggcgtcctgtacgccgacggtagcaccggtcttttcaaagatatgttctttgtccaggccctgttctaataattcaaatgcctgtttcgggtgctcaccgaatattttataaagatttttaacttcgagttttattgccatgcagtatatccattcagaataacgtggatgtgaaatgggtaaatgtggagcctctccctgaaaaaaaacgttatttaccctagcatacgagataatgctgacaaccccttgtttatgagaattaatcaaaaagaacggatatatttttagtgtaaaatcaccgggatctgctaaatatcttattttattaatatgtgaataatctgcgggaaataagaaaggaagagtaccggaaagttaaccaggcacttgttttaaccgctttttatccggaatgcctgaaaagggaatatgatgatattttgccggataatcccggcatcagtaagttgtgagattcatcgcgaaaacagggaaaaaaaatcacgccacattagatatgtttattaataataatgtgtaattaatggtgcaataacggatatttcgcttaagtaagaaaacaattcgataaaaacatcatgataaccgtaaaatacccccgtaaaaattgatgattcaggttgttttgtgagcgaaaaatgcactgatataaatatgctgcaatatcagtgcattaataaaaccggtgtttacagtgtaatacttaaacggaagtgattgatttaaaaatcccagtcttcatcttctgtgttcactgctttaccaatcacataagaagagccggatccggaaaagaaatcgtgattctcgttggcatccggtgacagcgccgataatattgccgggctgacatccgtcacactctccggaaacagtgcttcatagcctaagttcatcagtgccttattggcgttgtaatgcaggaatttaatcacatcctcagaccatccggctccgtcatataatttccgcgtataactgacttcattttcgtataaatcaaataacagactgaaggtaaattcctttatttctttgcgggtttgttcgtcataattctgtaatgaacgctggaatttatagccgatataatagccgtgtactgcttcatcccggataatcaggcggataagatcggcggtattcgtcagtttggcgcggcttgaccagtacatcggtaaataaaatccggaatagaataagaaggattccagaaacacgctggcgactttctttttcagcgggtgcgggtcacggtaatagccgaggataatcgctgctttattttgcagggtcggttcctcttcactccagcggtaggcgtcatcaatctcctgtgtggagcagagcgtggagaaaaccgagctgtaagagcgggcatgcaccgcttccataaagctgatattggagagcacggcttcttcatgcggtgtcagggcatccgggataagcgccggtgcgccgaccgtgttctgaatggtatccagcagggtcagcccggtgaacacgcggatggtcagctgtttctctgccggggtcagtgtctgccacgacggaatgtcattggagagcggtactttttccggcagccagaagttgctggtcaggcggttccagacctcgagatctttgtcatcctcaatccggttccagttaatcgcggaaatgcggcttaatgtggtcatgataatatcctgatataaaacggtttatacggcgcaggaaacacagcccgccacttcggtgccttccagcgcagactgacgcagacgcacgtaatagagggtttttatccctttgcgccaggcataaatctgtgcgcggttgatatcgcgggtggacgcctcatcactgaaaaagagggtgagggataagccctgatcaacatgctgcgtggcggcggcgtaagtatcgataatcttttccggcccgatttcgtaggcatcccggtaatactcaaggttatcgttagtcataaaggcggccgggtaatagacacggccgagcttgccttctttacggatctcaatacgggccacaatcgggtgaatggaggaggtcgcgtgattgatataggaaatcgatccggtcggtgcgactgcctgtaaattctggttgtacagcccgtgcgccatcacactctctttcagctgctgccagtccgcctgtgacggaacggcaattccggcatcagcaaacagggcgcggactttttctgtcgccggttcccatttctgtgtgatgtatttactgaaatactccccgctggcataggcagactgctcaaaattgcggaaggtctgctgccgctcaattgccagctggttggaggctttcagggcataataggcgatggttaagaaatagatattggtgaaatcaataccttcttctgaaccataatgaatatgctcccgcgccagataaccgtgcaggttcatttgcccgagcccgatagcatgagagccccggttgccgtgatcgatggacggcacactgcggatctgactcatatctgacaccgaggtcagcccgcgcacggcgatttcaacagagcgggcgaaatccggggaatccatcattttcgcgatgttcagcgagccgaggttacagctgatatcacgcccggtatggcggtaactgaggtcgtcgttgtattcgctggcactgttgacctggaggatctccgagcagaggttgctcatattaatgtaaccagcgaccgggtttgcacggttcacattatcctcaaacataatatagggataaccggattcaaactggatctccgccaggatgcggaaaaactcacgggcattgattttgcgtttgcggatggccttgttattcaccatgtccgcatagtgctctgtgatgctcagttctgacatcggtttgccgtaaatccgcgccacatcgtacggggagaagaggtacatcggctcgttatttttggccagctcaaaggtgatatccgggatcaccacgccgagagacagggtcttgatacggattttttcatccgcattttcccgtttggtatcgagaaacgtgaggatatccggatggtgtgcatgcagatataccgccccggctccctggcgcgcgcccagctgattggcataggaaaaggcatcttccagcatcttcatcaccggcaccacgccgctggactggttttcaatcagtttgatcggcgcaccggactcacgcaggttagtcagcaaaaatgccacaccgccgccgcgtttggagagttgcagggccgagttcacactgcgtccgatggattccatattgtcttcaatacgcagcaggaagcaggagacaaactccccgcgctgctttttgccgcagttgaggaaggtcggggtggcgggctggaaacgtccgctgatgatttcctccagcagatgctctgccagttgcgtatctccccgcgccagtgtcagcgccaccatacagacgcgatcttcaaaccgctccagatagcgctggccgtcaaaggttttcagggtatagccggtgtaatatttcagggcaccgaggaaggtcgcaaagcggaattttttgctgtacgccagccggaacagatttttaataaattcaaaatcatattgtccgatgacgtcagcttcgtaatagttttcattaatcagaaaatcgagcttttcccgcagattgtggaaaaacacggtgttctgattcacatgctggcggaagtagtggtgcgccgccgtgacatctttatcaaactggatcctgccctctgcatcatacaggttgagcatggcattcagggcgtggtaatccgtgtattcagtggtcatcgtgttatcccggaatcaggtaagcagcactcagcaggcggtctcagcggcctgctgctgccagaattggtgtaagccgcggcggacgttatcgacatccgcctgtgtgccgagcagttcaaaacggtataaaaacggcacctgacatttggcggcgataatgtcaccggcgatggcataagcgcggccaaagttggtatttccggcggcaatcacaccacgcagcagtgcccggttctcaggccggttgagaaagcggatcaccggacgcggcaccgcgctgctgtgatggccgccgccgtaggtcggcaccagcagcacaaagggctgagtggcggtaaggtcaccatcttccggcagccgtgtggccgggatccccagtttttccgtgaaacggtgacaggtttctgaacgggtggagaaataaatcagtgcctgtgtagtcatggtgcctccggcgtgtgcggttcagagggcggcaagcttgtcgggacggaacccggcccagtgatcctgaccggcgatcaccaccggcacctgctgatatcccagtgtgcggacgtgctgatacgcctgctcatcctgagtgatatcaatgatactgaacggaatatttttccgtgtcagcatctggtaggtggcattgcactgcacacaatcgggtttgctgtagatagtcactgtcatggcggtttcccgtggttatcgctgcccgttatgagcagatatcgtgggttgactgtgttttgaatactatatgtagatattaaatatatcaaccacactatatatagtgtttttgtattttgaatgattatcactattattaatccggatgtgagtaaatgcatgatgaactgtctgcacggtgaatatgaggagggggaaaatccacagcgacaaatgtccccgtcaggcgtacaataaaaaaatctgaactgtcttttgcagacagctgaatttattggcatctgaactgaaatcacacatttattatggaattagctccgtcttcccgaactatccgcacactccttgcttctgataccccgctgattgatgtccgcgcaccggttgaattctgccagggagccatgcctgcctcacacaatctgccgctgatgaatgatgaggagcgggccgctgtcggcacctgttataagcagcaaggcgctgaaaaggcgctggcgctggggtatcagctggtaaacggtgagcgccgtgaacagcggatagcagcctggctggcggcctgtgcggattatccgcagggctatctctgctgtgcccggggcggccagcgttcacatatcgtgcagcagtggctgcgggatgcgggaacggaatacccgctgatcaccggcggttacaaagcactgcgtcaggcggtgattcaggtgacggaagagctggtggcgcgtccggtgatcctgatcggcggctgtaccggcagcggtaaaaccacgctggtgggcgaactggcggacggtatcgacctggaaggactggcgcatcaccgcggatcgtctttcgggcgcacgctggaggcgcagtttgcccaggcgacatttgaaaaccatctcgctgccgccatgataaaaaaagaaaacgccgggacccgctgggtgctggaggatgaaggccgcgccatcggtgccaacggcctgccggagccgctgcgggtgcaaatggcactggcttcgctggtggtggtggaagatccgtttgagcgccgtctggaacggctgaaagaagaatattttgaccgcatgactcatgatttcaccgccgcatacggtgaggaaaaggggcgtgaggcatacagtgagtatctgcatcacgggctgtcagctatccggcggcggctcggcacgcagcgggcggcggaactgaccgcgctgctcgacagtgcacttgccgagcagtggcgcagcggcaataccgaagctcacttctcgtggctgtgtccgctgctggaagaatattacgacccgatgtaccgctatcagctgagcaaaaaaaccgaccgcatcctctttcgcggcacctatgaagccgtcgctgactggctgaaataatccgccgtctcatcattcgtcacaaagctgttcaccggggtatcattttccggtgaactgacttgcatgaattcatttgcctcgttattttctctgttgtgagatgaatgacgtaaatgatgtttgtctctttatcataattaggttttgctatagcaaaaccagcacaaagggcagacgtatggcaacgacttatataaaggctccggccggatttccccgccgttatatcattatcagcgcggatgagcaggggatcactgaactgggatttgatgatactgcgccggcacagacagacagtgataacccgcatatcagacagtgtattcatgagctggatgaatatttcgccgggaaacggcaggatttcagtgtgaaactcaatccgcacggtacggaattccagacccgggtgtgggcgcagttatcaactattccgtttgcgatcacctggtcttataaagatctggcgctgaagctgggctctgccaattactgccgcgcggttggtatggcaaacgggcgtaaccctgtttgtctgattattccgtgccaccgggtgattgcacacgacggttcaatgggcggatacagcagcgggctggatattaagcagtggctgttgcgccatgagggaattatctgagtaaaaaggtggcaaatgttgctgaccgttgaaataaccaggacaaatcctctggtatatcagcggaatatctctcacaatgacgttatccggcgggtagtttagtatcgaaccagattgcccggcaggatcaatacagtctgaaaacgactggccgggtactgatgaagtactatcacttgttaaagggtttttttgaatgtcaaagcgcaaaggtaacgtgaagtggtttaacgaagcaaaaggtttcggttttatcactccggaagacggcagcaaagatgtgtttgttcacttctctgcaattctgaacgacggtttcaaaacactggcagaaggccagaaagtggaatttgaaatcgttgatggcgctaaaggcccgtctgctgcaaacgttgtctcgatttaagttgtaacacgctataccgtagctgttattttaattcgacattatcgtgacgaaaacccgttactcaccatagtaacgggtttttttatatcagcgccggttggcgacctggctgagccagacactgccgatcaccacgataacccccgcacactgtaacaggctcagttgctgatccagcacaaaccagcccagcagtaccgccgtcagcggactgagaaaaccgagcgatgccacggaattcggcccgaggattgccagtccgcgaaaccagaacagataggtcagcgccgcgccaatcagccccagatacaataatccgctgatattgagcagcgtcagcggcggcagtgccggttcaagcagcagagagaccggcagcagcagtaatccgcctgcggtgagctgccaggtggtaaaggtcagcggtgagacattcggctgccagcggcggctcagcacggtaccggcggccatggagaacgcacctgctaacccggcaataataccgatggtgtcgagttttgcctgcggtgtcagtaacagcagtgccaccccgcctatcccgcacagtgcgccgagcactgccagcggcttcagtacattgcccagcaccatgcgggagagcagcagcacaatcagcggctgaatagcgccgacggtcgcagccacgccacccggcagacgataggccgagacaaacagcagccaccagaacaccgcgaagttcagtgccccgagcacgaaaatccgcccccaccagatccctttaggtaactggcggataaacagcatcagcagcagaccggcgggtaaggcacgcagcatggcaacagtcatcggataaccagcgggcagcatttcggtggtcaccagataggtactgccccagacggcgggagcgagtgctgtcagacataaaacgccactacgtttcataatttactcattaataatgtgatatggaacgcatcataatccgcatcagttgcagtgggaatagcggcagcggggcagagcacaaaagacatatatcattggttttttttccggtcagataaaacgccggtaacgggcaggcgaacgaaaagcgtaagcgccatggatggcgcgatccgagcgcacaaggatgtgtttacagcgacttttcgttttgcccgttaccagcgttatcaccggatcggcataaaaaaaccgccgtttttcagcggcggtttcaggtattcacagaatggcgggaaattacttaacttcttcgcctttggcctgcaaatcagcatggtaagaagagcggacaaacgggccgcaggcggcgtgagtgaagcccatcgccattgcttcggctttcatttcctcaaactcttccgggctgacataacgctgaaccggcagatggtgacggctcggctggagatactgccccagggtcagcatggtcacgccgtgacggcgcaggtcgcgcatcacatcgaggatctcttcattggtttcgcctaagccgaccatcaggccggatttggtcgggatctccggatgggcttctttaaagcgttccagcagtttcagtgaccactcatagttagcgcccgggcgcacctgacggtaaatacgcggtacgttttccaggttgtggttgaagacatccggcggagtggcggtcaggatttccagtgctttatccatacggccgcggaagtccggcaccagggtttcaattttaatcgccgggctgtggtcgcggatagcggtgatacagtcagcaaagtgctgtgcgccgccgtcacgcaggtcatcacggtcaacagaggtgatcaccacataacgcagtcccatatctttgatggtctgaccgagtttctgtggttcgttggcatccggtgcattcggacggccgtgggcaacgtcacagaacgggcagcggcgggtgcagatagccccgaggatcataaacgtggcggtaccgtggttaaagcattcgctcaggttcgggcaggaggcttcctcacagacagaatgcaggccgttacggcgcattgcatctttgatccctttgattttatgggaatcagccggaagtttgattttcatccagcttggtttgcgtaatcgttcggtcgtctctgataccaggtttttgaccgggataagcgccattttatcggcatcacggtatttgataccgcgttccatctgaattggtttactcatgtttatgtcatttccggttagattcatcggatagtgattgatgagtgccgtggtgacggcctgtctgctgaatgtaacgaagtcatcaatcttttaaaaatctttttaaaaatgttaaaaaaattatatcactattctgcggcaagttggaatcctaattgccggcagaattgtgcggtcagcacgggctgaacatccgcaagggtaataccgggaacaaaatcagccatttgtgtcatggcgagaccggcatagccacacggattaatacggtgaaaaggctcgagatccatattgatattgagcgccaggccgtggaatgagcggccgttgcggatccgcagaccgagtgaacagattttgttacccgccacataaacaccgggcgcatccgggcgcgggtaagcgtcaatattccactgtttcagggtctcaaccactgaattttccagcgcggttaccagttcgcgcacaccgattttgtcgcgtttgagatcaatcatcacatacatgacctgctgtcccgggccgtggtaggtcacctggccgccgcgatcagactggatcaccgggatatcaccgggggagataacatgttcggctttccctgcctggccctgggtaaaaacgcgctcatgctcgaccagccagatctcgttaccggtttccgccgtacgctgttcggtaaattggtgcatggcttcagagacaggatgataaggccgcaggcccagctgacgtaaaataatggtgttattttgcaaaatggtatcttcagttcggtatgccgggccagcagtataacgcgcacggcaaatgcgtaccagtgatgcgcataaaatgttcagagggataaaaaaaagccgcccggaaaggcggcctgaaatgatgaagaaatgacggtgttacaacaccattctgacgcgctctaacgcgcctaattcttcgtacagattctcgatctgctcaatgtgtgtcgcatcaatggtgacagaaacggaatgataggttcctttgctgcttggtttgattgacggactgtagtcacccggcgcgtggcgctgaatcacttccagaacatcattcactaattccggttcagcggcacccatcactttgtaggtaaatgagcaggggaactctaacagttcattgagtttggttttcatgggtgctccttaataaagcaaaacgtcagatgaactaaatatggggatagttcatctgatttcaagtctcagccgaaccagcggtgaaacagcaggcggatgtagtcgatcagacggctgaagaagttcccttccggtaccgcttccgtcacgaccagcggccgtgtttcaatgatctggttgtcgagctggaaattaatggtaccgaccacctggtttttcgccagcggcgcatgcagctccggatcggtcaggacaaaaccggctttcagatctttcaggcggccgcgcggaatggtgatataaacatcattttccactcctaactgcactttgtctttatcaccgaaccagacgatttcagacaccagcgggttgtctttctgcatcggtctgaccgtttcgaagaaacggaagccccaggtgagcagtttcttgctttccgcattacgggctttagccgatttggtgcccatcaccacggagatcagacgcatatccccttcggtggcggaagcgaccaggttataacccgcgccgttggtgtgaccggttttaatcccgtccgcattcaggctcttatcacccagcaggtcgttacggttttgctgggtaatattattataggtgaatgagcgctctttatagatagcatattcattcggcacgtcgcggatcattgcctgaccaatcagcgccatatcccgcgcactgctgtactggccgtcggcatcgaggccgtgaacggttttaaagtgggtatttttcagaccaagctgcgccacatactggttcatctggccgacaaacgtgtcctgatcaccggcaacaaactcggccatcgccacacaggcatcattaccggactgcaggttgataccgcgtgtgagatccgccacgctgacgcgctcgcccggtttgaggaacatcagcgaggagccgcggaataccgggttaccggttgcccaggcgttttccccgatagtgaccatggtgtccggcgtaaatttaccggtgttcattgcctggccgatgacatagctggtcatcattttggtcagactggccggatcacggcggacatcggcatttttctccgccagcactttgccggagtggtaatccatcagaatataggattccgcttcaatatccggaacaggcgggatggtggtattcagattcggaacatcagcggcagaagctgcggcgctcagtgccagggtcagaccgaaagcggccaggcgcccggcgcggtgttgataagtcgttgcgtatttcatgagtgttaaaacaacattgatgatgccggtgaaaaagaaacgctatcatagcaaaactgctatgacagcgcgtagtgttatcactgcctgtttttaaggtgcaaggataaatgaattcatattcagctgctgctgaaggcgtccctgtacttcggcggcccgttcacggctggtaaacggccccagctggacacggaacatatcaccggaggattctgtcataccgggcacacccagtttatcgctgagctctttctgccactgtgttgcgcgttccgcacttgccacagcacccacctggacgcggtaaccgctgacagcgacctgctgcggtgcgggtgcggcggtgttttcagtttgggcttctgccggtgctgcgggctgtttcacggtcgggatcagtgcggattccggctgcggctgtgccataacaggacggctgttgatcggcaccaccggggtggtattggtcaccggcgtaccgagagcactggttttgcccagttcagggcggcccggcagggcatagctctgtttggctaccacggtaccgacagtcccggagccgctcagcgagccgtcttccgcaaccacaatcgggtcaattttaattttggtattcggcagcaggttcaggcgatctgcgacagcgcgggaaagcccgatctgtttgcccggcatatacgggccgcgatcgttaatccgcaccaccatcatgcggttattcgccatattggtgatccgcgcatagccggggattggcagcgtcgggtgggatgcggtcagttcggcgctgttgacgatttcgccggtagcggtccggttaccgttctgggcctgaccataaatccaggcatatccctgctgactgaagttttccggatcacggacaatctgatactgctgaccattacggacgtaatcattattcgcgcccggatgcagcggctcgtaggccggtacggcgccgagaatctcttttgccgggcccggcggcggtgtctgtttgaccggcggctgcactgacgggcaacctgccagcaacgcggccatcgctgtgaccgcaatccattgtaaacgcatgaaaacctcgtaatgtattataagctttttgacagcatcttacggtgtgtatgaattgacatgacaataccaaaccctgccattaatacaatcagggcggagccgccgtaactcatcatcggcagcggcacaccgaccaccggcaggatcccgctgaccatgccgatattcacaaacacatagacaaagaagatgagcatcagaccgcccaccatcacccgtccgaaggtattttgggcgcgggcggcaatcatcagcccgcgcatgatgatcagcagatagagcaccagcaggaaaatcacacccaccagccccagctcttccgcgaggacggcaaagataaagtcagtatgacgttccggcaggaattccagctgggattgtgtgcccagcatccagccttttccggccagtccgccggagccgatggcaatttttgactgaataatatgataaccggcaccgagcgggtcggtttccggatcgagcagcatcatcacgcggccgcgctggtaatcgtgcatcaggaaaaaccagagcagcggaataaaggcggcaagcagcagcagggctatcccgataaggcgccagctcatcccggccaggaacagcacaaaaataccggaggcggccaccaggatggatgtcccgagatcaggctgtgcggcgaccagcagggtcggcaccaccaccagcagcagggcgatggcggtatttttcagggtcggcggacactggtcgcggttcataaaccgcgccaccatcagcggaacggcaattttggcaatctcggacggctgaaaacggacaatccccagatccagccagcgctgcgcgcctttactgatctgcccgaagacatccacaaagaccagcaggatgacacagacaatatagaggtgcggtgcccaggtctcatacacgcggggcgggatctgcgccagaaccagcataatgatgataccggagaaaatctgcccgaggcggcgctccatcatttccggatccagcccgctggcactccacagcacaaatgcactgtaaaccagcaggatcagcagcagcaccagcaacgggaagtcgatgtgcatgcgggtcatcagggatactttgcgcggattatcagtcatgggcatcactctgtttcactgccgggcggtgatggcggagcatccggcagtaccgtgttgttatcacccagcaggacgtggtcaaggatctggcggaccagagtaccgactgccgggcctgcaccgccgttttccagaataatggtcaccgccactttcgggttatcgtacggtgcgtaggcaatcattaatttatggtcgcgcaggcgttctgccagtttgctggcgttataggtttcgtagctgaacacctgtgctgtaccggatttagcggccgctttgtacggcgtaccggcaaagaatttgcggccggtaccgttcggtgcgttagccacgccgaacatcccggacttggccagttcccagtaaccggaatgaatatcaccgatagcaatatattctttctgttcatacggcagcataccgccgccttctttggtaccgagcagcaggtgcggtgttttcaccacaccgtcattaatcagggtattaagggcttttgacatctggatcggcgttgatgtccagtatccctggccgatcccgaccgggatggtatcgccctgataccactgtttcttatagcgccgcagtttccattcacgggtcggcatcacaccgttgtactcttccatcaggtcgataccggaatactcgccgtaaccgaagcgggtcatccaggcggacaggcggtcgatccccatgtcatacgccacctgatagaagaaggtatctgccgattcaataatcgatttcaccacgttcagattaccgtgaccatagcgtttccagtcacggtaacgtttttctgagccgggcagctgccaccagccggggtcaaaaatcgtggtgttacgggtgatcactttttcgctgagtgccgccacagaaataaacggtttcactgtggatgccggcggatagagcccctgggtggtgcggttgatcagtgggcgatccgggttattgagcaggccccggtaatccgggccggaaataccgttcacaaacaggttcgggtcataactcgggttggacaccagtgccagaatctcgccgttgcgcggatcactcaccacgacagccgcccggctggtggtcagcagtttttcgatatacatctgtaattcgagatcaatcgtcagatagatatctttcccggcctgtggtgcctgctcgtgtaactggcggatcacgcggccgcggctgttgacttccacttcctcatagccggttttgccgtgcaggacggattcataataacgctcaatacccagcttaccgatatcatgagtggcggcatagttcggcaaaagaccgtctttatccaggcgctcgacatctttgtcgttaatttttgccacataaccaataacatgggtcagggcggagccgtaagggtagaaacggcgctgatagcctttgatttccagtcccgggaagcggtactgatttaccgaaaaccgtgccacctgtatctggttgagcggggttttcagcggaatagaggtaaagcggcgggaacggcggcgttctttttcataattcgcgatgtcttcatcggtcagatcgacaatctcgcgcagctcattcagtacgtccggtaggtcagtgactttctccggcacgatttcgagctgataaatggttctgttttccgccagcagcgtgcctttgcggtcataaatcagaccccggctcggcggaataggaaccagtttgatccggttatcattggaacgggtctgataatcttcatggcggttaatctggagatgatagagattcaccaccagtacggcagataaaataacaataccgataaatgcaaccaccgcacggcggataaacagggcggattccgcgctgtaatcgcggaagtccatccgttgcttgtgttttttcttatcgccgtcaggcgcgttcagaccgggcactgcggttattccctgtgatacggatgattggcagtaatactccaggcacggtacagactctccgcgaccagcacacgcaccagcgggtgcggcagggtcagcggggagagagaccagctctgttctgcggctgctttacaggcaggcgaaagaccttccgggccgccgataagcaggctgatgttgcgtccgtcctgcttccagcgttccagttgcccggccagctgcggggtatcccagcgtgcgccgggaatatccagtgtgacaatccggttgcctttacccgccgccgccagcattaactcaccttctttttccaggatccgtttgatgtccgcgttttttccccgctttccggccgggatttcggtcagttcaaacggcatatctttcggaaaacgatggagataatcctgaaatccggtttcgacccagtcaggcattttggtgccgacggcaatgagctgtaacttcaacactcagctccagagtttctctaattcatacatacggcggctttcatcctgcatcacatgcacgatagcttcaccgagatcgacaacaatccagtcggaaatgccctgaccttccacgccgagcggcatcataccggcctgacggcagtcagtgacaaggttatcggccacagacgccagatggcggctggatgtgccggtacagataatcatgtggtcggtaatgctggatttaccgcgtacatcaatagtaataatgtcctgtgctttggagtcttcgagtttatcaataataaactcaagtaattctgtgccttgcaaaaggttcaccttatattccggataaatagataacagaacacatccccgtcagtcgtaccgccgtggcagttccggcgcggggttgctgtgtgccgggggataatcgctattttacgttacagagggcaattttgcgaggctcaccctgcgttgccgccggcaccgcaagaataacagcgaacagggggaatacaaagcagtaaagattaaagaaatatcaggaaatgtgcggacagggaaaacagaaacagtgcgatttgtactatagtcactccgtaacagataaaaaggcggaaaatatgacatatcagcgacaaccggaaagtagcgatgaggatgcactgtggcggcagagggcgcggcaggaactgattcaggcactgaatccgccgctcagtgcgggcgggctgatccgtctgcacagtcgttacaaatatgcgctgatggcatattcaccacagttatataaaagcagcggacggctgttgtcacaggcaggaaaactttccccggcggaactggcggaaacggcggcggtctggcagcaggcgctgcttaccgcattttcacagcctgcgacccgcgccaatatgaccaatgcactgatgcatatgcagggctatttcaaacgtttactgagcccggcagaaaagcagcagatgagtgcggcgattgaaacttaccgaaccggcaccggctctgcggaggcggtgaaacatctgttgctcaccactgcccgccactatcagacagattatctgtgtgatcaggcaatactgcagccggtaacagcggctcagtcacactccgggcgcagcagtgtgtagcggtcgcccatattctcataaccccagtcacacatcagcagcagaatcgggatcagggaacggcctttgtctgtaatagtatattccacgcggggcggcacttcggcaaagaccgtccgggtcagcaggccgtccgcttccatctcgcgtaattgattggttaatgttttttgtgaaatattgacaatataagcccgtatttccccgaaacgctgaacggttttttcagataataaatttaatattaacggtttatatttcccgccgataacagacagcgtaacttctatttcactgaccactacaattttctttattttatcgtccattagttacctgcaggttactttgtgaaataaatctgccttcttgatatatgtaaagcaaggcataaaatcatgcaactttatttatattctcaggataaatgcaatgaaaaaattagtggttattaccggcgccagttccggtatcggtgaatctgtggcaaaacggatgagtcaggccggacatccggtcttattactggctcgccgcagtcagattaccgaagggtttcatctgccggacagcctgtgccgcagtgtggatgtaacggatcttgcggcaatgaaagccgccatagcggaagcagaaagcctgtatggcaaaacagatttattaattaactgtgcgggtgttatgctgctggataatccgtatgatcaggattatgcagagtggcagcaaatggtggatgtgaatattaatggtgttctgaccgggattaatattgtattgcgcgatatggtttcacgtcaggaaggaaccattattaatatcagttcaattgccggacgaaaaacattcccgagccattccgtctattgcggaaccaaatttgccgttcatgcgataacggaaaatatccgtgaagaagtggcatcagcgaatgtccgtttaattaccattgcgccgggtgtggtggaaacgccgttattaagtcataccaccaatgaggaaattaagcagaattaccagacctggaaaaaagagattcagtcaggtctggatccggaaaaaatcgcggattgtattcagtttgcttatcagcaaccgcaggatgtgtgcatccgtgagattgtaattgccaaaaccaggcaggctgggtgagtcagcggtacagtccctgtgccagaatgtagtcctgaacggcgggggccagctgatcgctgcagtcctcgccgtttttcagccgttcgcggatattggtggcggaaatcggaaacagaggggtatcagccaggaaaatataaccgcacggccgtttgtgcaggctttccggcgtggtgaccagatgctgcacaaaccagtcagccagctgttcggacggaaaatcgagtgaataccccggccgtttgcagaccaggatatggcacagggtcaggattttgtcccattcatgccaggtatcaatcgtgagcagagaatcctgaccgatgataaaagccagcggccgccgtgaaccaatctcagcccggtactgacgcagtgtttccaccgtataggagagggcatcgcggcgcagttcgcggtcgtctaccagaaacagcgggtctccgctgacggccagttgcgccatcatcagccgctgttttgcatccgctttcggctgcggacggtgcggcgggacattgttcggcagtaaaatcacctgttccagaccggcttccgatgccatggctttcacggtattgatgtgcgcctggtggatcgggtcaaatgtgccgccgtacagcgccagaatccggttatccgcgttgttcgtcatagaggatctgtcctgtctgtgctttaccgctcaggagcagtgtcagtgtcagtaagtcatcacttacggattgtccgtaatcctgcttgaggcggatttcaatacgggtgatcagggatatcgccacctgcagggtatgcgcatcaaggcgatccagggcttcggttatcataccgcggcggttctgccagatacggtgcttgtcaaacagtgtgcgcagcggctggtttcggctttcgcgctgtaatgtcagtaactgcatcacttcccgctggacggtgcgcagcagtatcaccggctcgttatcttccgccagcagctgagtcaggatatgacaggcacgtttgctttttccggccagcagggcatccacccagtgatacggggtaaagtgtgccgcatcattcactgctgcttccacacggggcagtgtgagtttgccgtcgggatagatcagcgccagccgggagagagcctgtgacagcgccagcagattgccttcgtagcaatagcagagcaggcggacagcctgttcatccggttgcagttgtaacagtgctgcccgcgcggtgacccactgcggcagtcggttcagttccggggtcatgcaggcgatatagacgccatcctgtgccagcgctttaaaccaggcgctgttttcctgggctttggtcagtttatggccgcgcagtatcagcagcagatccggatgtaactgcccggccagccggagaagctgttcgcccattgcggcattggggccgttttccggcagatacagggtgagtgtctgccgtccggcaaacagactgagtgaccggcagacagaaaaaatcgcatcccagtcagtatgttgttcaagagaaaaggtgaagtgctcgtcaaatccctgttcctgcgccgcatggcggatagcatcccgggattcctggagcagtaacggttcgttcccccagaggaggtaacgttcacgcagccccgaacggagctgcgtgatgagttgctcaggtgaaacttttatcatgccttcggtgcgacaatctcagccgcttcagcattttcagcctgtttctgttgttcggacggctggataatcagcagtttacgaaccagacgggcggctgcctgctcacgcatttcctggcggatcatatctttttccgcatcttttgcgagtgcttccagcgggttatcgaagaatgaacggtcaacgcggacattgatcggataaaccgacccgttcggcataatgacctgggcattcaggtaataaaccagctctttctcagcggctttaccgtcctggaaaatcgatactgtctcttccgaaccttcggaagaactggtgatcttcagaaccgggatggtggcatcaccaccttcaataatctgaacgttattcagcagcagttgctggcggatagcacgggtttgttcgccatacggatcaccggtgctgatttgcagtttctgcagttcaggcgggatttgcgtggtgccgcgcagatggaagccgcagcctgcggtgaccagcaccgcaagcccgagcaacagcgtgataatgcgatgtcgcacgatatctccttaaattaacccacgaccaggttcagtaatttacccggcacataaatgactttgcgaacactcacaccttcgaggtatttcgccacattagcttcctgcgaggccagcgccatgaccgcatcctgctccgcatcggcggcaacggtgatacggccgcggactttaccgttgatctggataacaatcagtttggtatcgtcaatcatcgcttcttcgctggcgaccggccactgtgcatcatccacatccgtttcgtgacccagtgctttccacagggtaaaaccggcgtgcgggataatcggcgacagcatacggataaccgcatccagcgcttcctgcatcagtgcgcgatcctgctctgtttcctgaggtgcgcgctgcagttcattgagcagttccataatcgccgcgatggcggtgttgaactgcttacggcggccggcgtcatcgctgactttggcaatggttttgtgcagtgagcggcgcagatctttctgttccggtgtcaggctgctgatatccagcggcgcggttttgcctttctgaacatgctcatacaccagacgccatacacggcggataaagcggttcgcgccttccacgccggattcctgccactccagggtcagttccggtggtgccgcaaacatcataaacagacgaacggtatccgcgccgtatttttccaccataatctgcggatcaacgccgttgttcttcgattttgacattttgctcatgccggtgtgaaccagctcgcggccttctttatctgttgccttgatgatacggtttttatcatcacgctcaagaatggcatcttccggagacacccatacgcggtggccgtcagtgtcggtgtaatagaaggaatcagccagtaccatgccctgacacagcaggtttttcgccggttcatttgagttcaccagaccggcatcacgcatcagtttgtggaagaagcggaaatacatcaggtgcataatcgcgtgttcgataccgccgatatactgatcgaccggcagccagtagttagccgcagccggatccagcatgcctttgtcatagtccgggcagcagtaacgggcgtaataccaggaggattccataaaggtatcgaaagtatcggtttcacgcagtgcaggctgaccgttgatggtggtttttgcccactccggatcggctttaatcgggctggtgatgccgtccatgaccacatcttccggcagaataaccggtaactgatcttccggaaccggaaccacggtgccgtcttccagggttgccatcgggattggtgcgccccagtaacgctgacgggaaaccccccagtcacgcagacggtagttgactttgcgctcgccgacgccgagtgccaccagtttgtccgcaattgcgttaaaaccggcggtgtaatccagaccatcgaactcacctgaattgaacagggtgtttttgccggtcattgctgcttcactgatatccggtgcgttaccgtcttcgcccaggatgaccggcttgattggtaaaccgtatttggtggcaaattcccagtcacgctgatcgtgcgccggaacggccatcactgcgccggtgccgtattccatcagaacaaagttggcgacccagaccgcgactttttcgccggtcagcgggtgaatggcaaacataccggttgccacgccttttttctccatcgtggccatttcagcttcggccactttggtattgcggcactcgtcgataaaggttttcagttccggattgttctgcgcagcctgctgtgccagcggatgacccgccgccaccgccagataagtgacacccataaaggtatccgggcgggtggtgtagacactcagtttttcggtgctgtccgcgacatcaaaggtgatttccaccccttcggaacggccgatccagttgcgctgcatggttttgacctgctccggccagtcttccagcgtatcaagatcattgaggagttcttcggcataagcggtgattttgataaaccactgcgggatctctttgcgctcaaccggggtatcacaacgccagcagcagccgtcgataacctgttcattcgcgagaacagtcaggtcatgcggacaccagttcacagcggaggtctttttatacgccagacctttttcatacagtttggtgaagaaccactgttcccagcggtaatattccggcgtacaggtggtgacttcgcgatcccagtcgtaggcgaaacccagctttttcagctgctgtttcatgtattcgatattggcataagtccacggagccggggcggtgttattttttaccgcagcaccttccgcaggcagaccgaacgcatcccagccaatcggctgtaaaacgtttttacccagcatgcgctggtaacgtgacatcacatcacccagggtgtagttacgcacgtggcccatgtgtagtcgtcctgaagggtatggcagcatagacaggcagtagtatttctctttactgttatcttcagtcactttaaatgtttgtttttcctgccagtgactctggacttgttgctctatgtcttcgggacgatattgttcttgcatggcaccggtattcctgtggtgatgaactgccggacacggactgacgaccagaccgggcggacagcatgaaaatattgggtttcgttaatttctgacccgttagcatagccgatatgcccctgagggaacaacagttaagggcgtaaagggatgaaaaaagcgggggaatgataaagagaagaagaaaggccggtctgtgaccggccggtcagaacatcagtgcagaatcttggcaagaaaatctttggcacggtcggatttcgggttggcaaagaaatcgtcttttctgctgtcttcgacgattttgccctcatccatgaaaatcacgcggtccgccactttacgggcaaagcccatttcgtgggtgaccaccatcattgtcataccttcgtgtgccagttcaaccatcacatccagtacttcgttgatcatttccgggtcgagggcggatgtcggctcatcaaacagcatggcgacaggatccatacacagggcacgggcgatagccacacgctgctgctgcccgccggacaactgggacggaaatttatccgcatgggcagacagtccgacccgctccagcagtttcagccctttttcttttgctgccgctttatcgcgccccagcacttttacctgtgccagggtcaggttttccacaatggataggtgcgggaacagctcaaagtgctggaacaccatgccgactttggaacgcagtttcgccaggttggtgcgtttgtcattcacctgaatatcattgacgaaaatctcgccctgctgcaccggctcaaggccgttgacggtttttatcagcgtggatttaccggagccggacgggccgcacaccacaaccacttccccttttttgacttcggtcgagcagtcggttaagacacggaactgaccgtaccatttggagatatttttcagggagatcatgacacagtccttctcttgagataattaaccagcattgacgcaccaaagctgataacaaaataaaccgcacccgcaaacagcaccatttcgatttgtgttccgtcacgctcgccgatattgctggcggtgcggaagaaatcggtcaggctgagcacatacaccagcgaggtatcctggaacaggacaatcccctgggtcagcagcagcgggatcatcgcgcggaatgcctgcggcagaaccaccagacgcatggtctgcattttggtcataccgagggcgagtgaggcggatgtttgtccccgtgacacactctgaatcccggcgcggataatttcagcataatacgcagcttcaaacagggaaaacgctaccatagctgagatcagacggatatctgtttttggtgatatgccaagaacattttggactaagttaggcacaatcagatagaaccataacagcaccattaccagcggaacggagcggaaggcgttcacatagagagcagccagccagcttacaatctttatggatgacaggcgcatcatagccagtatcgtgccccacaggatgccgataacaatcgctgtaactgtgattttcgccgtaataaccagcccctgtaacaggaacggcatacccggcatcaccgaactccagtcaaattcgtacatcagtggcctcctgtcccgggcagacgcacccgtttttccagtaaatgcatggccagcataataataacgttgatgccgacataggcgagggtgattgcggtaaaggactcataggctctggcggaataatccagtaacttcccggcctgcgcggccatatcgaccagcccgatagtggaggcgatggcggagtttttcaccagattgagcatttccgatgtcatcggcggaataatcacgcggtaggcattcggcagcagcacatagcggtaagtctgcggcagtgtcagccccattgccagcccggcggctttctggccgcgcggcagtgactgaatggcggcacgtacctgttcggtcatacgggcggcggtaaacagccccagacagagggtggaggaaataaagaactggatattcgggtcgagatccattttaaaccagtcgcgcagggacgacggcaggaactccgggatcaccagataccaggtgaagaactggacgatcagcggcacattacggaaaatttccacataaatggtgccgagcgaggagagaaacttattcggtaccgtacggagaataccgaacagggatcccaccagaaaggcgataatccaggcacagattgacagcagcacagtgaccttcaggccggacaggatccagccgaggtaagtggtgttgccgaagggggcgggctgaaaaaagatgccccagtcccagttagctgacatagcgcggctcccggtaaaagaacgaactccctgtataagacggataaccagtggttaccggacagacagtgtgtttgcatgcaacggactgtggtttatcgtccgcgcccgcgtcagttgtgaacgcaggcgcggcggtcttagttatatcctcagtccggacggcgcagccggtcaggctgtcagccgccgtggtggttattcaaaagccttgtcattcggcgctttgaacagccctttcatttcatcggataattcaaagttcaggttgagattcttaggcggaatcggctgtttgaaccagcgggtataggatttctcagcctcaccggaggtttgtgcatcagaaaccgttttatcgatcagggctttgaactgcggatcatctttgcgcagcatacagccgtaggcttcttcggactgcggcgtgccgacaatcacccagttatccggttttttcgctttggcgcgctcaccggccagcagggcatcatccatcataaaggcgacagcacgaccggattccagggtgcggaaggcatccccgtgatctttggcgctgataatgcgcatcttcatctgcttctcatcattgagtttgttgagcagcatttcagacgtggtaccggatgtgaccaccacgtttttcccggcgagatcggcaaagtctttgataccggagtctttaccggtcagcagacgggtaccgaccacaaaaatagtattggagaaagcggcctgctgctggcgggccaggttgttggtggtggagccgcactcgaaatcgaatgtgccgttctgtaacagcgggatacggttctgagaggtcaccggaattagtttgacctgtaaatccagcttattcagggtctttttcactgcatcaacaatatggttggagtaatcctgggaatagccgaccacgttttgctggttatcataataagagaagggtacggaggattcgcggtgaccgacaacaatcacgccgctgtcattgatttttttcagtgtaccggccagctcttcagcagaaaccgccgcactggcaagcgcggctccggtgaccagtacagacaaaactaacttgcgcataaacaactccttttcgggaaacggtataaggacgtgtgttgctcttgtggttgtattgttaaaaatagaacactattgttaataaatggaagttaatttgttttaaatcgggagatccctctcactctgtccgataaagatgtgcaagttacacccggaacgtgtgttcacattaaattatggtattttgaattggtttggttttatatgctggttatggtgtgtttattaacctgctaatggtgctttttactgcttagtacggtacttttatggccgggaagtgctattgtgtcataatccgctgttgtaacaattctgctgtgcggcggtaacatcatattgcggttaaatgtgtaaagttatggttatccggttgtctgaaatcgcaggctgtgtaagataggcggtaactatcggggagcgggctatgctgaagcaacgcaggcagggttatctgctgctgtttttcacattattctttatcctgttgtgtctgacacaacggatgtctggtgcgccgcgcatcagtctgagcccgtctgcggatttcactaccccggtgctgctgagtgatacggaaaccggcagcgccaatcccggtggtacctgtgatatcagcgccaagtcgctgagtaccgtgccgcagttcccggcagaacctctcttttttgcccttcttttcttcgtcatgacctcggtgatagttcctgtccgttaccgttcgcgctcgtggcgtcagcatatcccgccgatgcggctgcgcaggcatctccatttctgtgtgatgagggattagcaaccggcaatctgtgtattgtcgggttttttgcttaattcggagataaaaaaaattatgcgttctgtattaacagcgtttgtgctgtttttgttcacgctgaccactgtgcatgcggctgataccggctggaccgaaatgccgcacaatgatcacgcccgtgtcagagtcacatcagatcagtggaaagacggaaaactgcgtctgctgctggcggttgaattacaacccggctggaaaacctactggcagtcaccgggagagggaggcgttgctcctgaactgacatggcaggaggcctctgccggaacacagtggttctggcccgcacctcagcgttttgatgtcgcagggctctccacccagggctacggcggcagtgtggtgttcccgctggaagtcacggcggctcaggcgctgccggtgctcagcgggacactgaccttatccacatgcagtaatgtctgtatcctgaccgattatccggtctcactggatacctcagaacccgcgccggacgattttgaccgtcagtatgcgatggccatgcagcaggtgccgcagaccggcggtgatatcaccaccggtggcagccgggtgaacggcgggacgctgacgatggcactgcaccgcccgggcggctggcaggatccgcagctgttttttaatgcggataaagaaaccatttttgccgcaccgtcatttacgatttccggggataatctcattgccaccgttaaagtaacggatgactggggggaaatgccgtcagatctgaacggaaaaccgctgtcggtcgttgtgacagacggcccggcagtgcaggcgctcaccacggtgatcggcagcggaccggatattgcggccgcatccggcagtgatacctcctttatcatgttgctgctgtttgcattgctgggcgggctgatcctcaacgttatgccgtgtgttctgccggtgctggcgatgaaactcggctctgtgctgtatgtggaaaaccgcgaacagcggatgatccgcacccagttcctggtttcctcctccggtattatggtctccttctggatcctcgcggcgctggtgtcgctgttacgtctgacacaaagtgcggtcggctggggaattcagttccagaacccgtggttcctcggctttatggtggtggtaactttactgttcagtgccaatctgttcggtgttttttctatccgcctgagcagtaatgcaaccacaaaactggcgacagcgggcggcaaagggatgcgcggccactttatggaaggtatgtttgccacgctgctggcgaccccctgtaccgcgccgttcctcggtaccgccgttgcgtttgcgctggtggctccgtattcacagctgtggatgatttttaccgcgctggggctggggatgagcctgccgtggctgctgatcgccgcgtttccgggaattgcccgggcgctgccgaaaccgggccgctggatgaacggtctgcgtctggtactgggtggcatgatgtttattacggcactgtggctgatcagtctgctgatcccgcacaccgggccggaaaccgctgtggtgatggtggcagttgtgctgctggtacttgcgctgctggctttccgccgtaccggtattaagcgcggatctgcggcactggtggcactgctggtggctggtggtatctgggccgctatcaatatgacggatgaccggcagcagagcttggtcagtgatcaggtggactggcagccgctgacggaagaggcggtgaacaccgcgctttctcagggtaaacgggtttttgtggatgtgaccgccgaatggtgcgtgacctgcaaagcaaacaaatacaatgtattattacgcgatgatgttcaggacgcactccgtgaaccggatgttgtcgcactgcgcggggactggacaaaaccgtcaccggatattaatgcatttttacaaaagcgcgggcatctggcagtaccgtttaatcagatttacggccccgctttacctgatggtgaaatcttgtcaccattgctggataaagaaacactcttacatctgttaaatcagtcacaaggaattgaaccatgaaaaaaacactcgcggctttaatgattgctccgcttatctttaccgccacagctcatgcggccgcttttaccgctgaccaggaagcgcaggtgcgtgaattggttcgtgacacgctggtcaaaaacccggaaattctggaagaagcgattatggcgcttcagcagaaacagaccgaaaaacagaccgcacagatgaaagatgctgttaaagccaatgctgacgcgctgtttaatgataaatacacgccgcgtatcggttcaaaatcaccgaaactgaccatcgtgtctttcaccgattacaactgcccgtactgcaagcgttttgatccgcagctggaagcgatggtgaaaaaataccctgacgtggcagttgtcttcaaactgctgccgttcaaaggggaaagttccctgaatgccagccgtgccgcactttctgtatgggaaagcaagccggaagcatttgcaccgctgcataaccgactgatgcagaagaaaaccgcactgactcaggatgacatcaacagcgcactgaaaaccgccaaagccggtgatgtgaaagtcactgataacagtatgaataccatgcgtatgaatatgatgctggcagagcagttaggtgttcagggaacccctgcaacgctgattggtgatgtgatgctgccgggtgccgtggatgaagcacagctggatgccatcattaaggaacagctggctaaggttaaataatgcggttactgcgcagatggggaaaggaatttctcctgctgctggtgattttatttattgcgtcacaggcgatggactactggcgcaaaccgcaggcaccggatttaaacacggtgccttcgctgacactgacagatggcacaccggtgtccattgcgcagatgagtgcggaaaaaccgctgttggtctacttctgggcatcctggtgcgggatctgcaaactgacctcgccgtcagtcagcgaactgtctgagtctggctacaatgtggtgacggttgctatccgctccggtgaagatgaccggctggcgaaagggatggcagcgaaaggttactattttccggtgattaatgatccggatggccgtatctcccagctctggggtgtgaatgtcacgccgacttttgtgatttatcacaaaggggagatagtcagttacaccagcggctggaccagtcagttggggatgatggcacggttgtggctggcgaagtaatcagtctgaaatgaaaaatcccgcggtgagcaatcacggcgggatttttttatctgcggaaacttttcgtatcagcgaaaatgcagaccgcgttctgtgctctttctgcgttttatcagtgccagacccaggaagacaacggtggcaccccagaccggccaggtgcccatacggtaatacggtgtgaagccggacgctgaggttacagtggcactcagggtggcctgtgtgaactgcggcaactgagcggtgacagagccgtccggcgcaataatagcggtaataccgttattggtggcacgcagcagcggacgacccagctccagcgcacgcatccgtgccatctggaaatgctgccacgggccgatggagcggccgaaccaggcatcattggaggcagtcagcagcacgccggttttatcggtcatattgcggcgcacctgctccccgaggatcacttcatagcaaatctcggcggtgagtgtcatttttccggcggtcagcggcggctggatgtaacccccgcggctgaaagcagacatcggcagattaaagaacggcgccagcggacgcagtaaatcttccagcggcacaaactccccgaacggcactaagtgatgtttgtaatagcggtttttatcccggctgtcgtattcacttttattacccagcacaatcagggtgttgtaaacatcgtactctttaccgtctgctttcggaactgcatcaaccacaccggtgatcagctgtgcgccgctgagtgtcagcaggccgttgagctgatccagaaacgcagactgactggcggcaaaatccggaatagcggattccggccagataatcagggtatcaggccggaagtacgggcggctctctttgagatagatacccagcgttttatccagcataccctgttcccatttcagggactgggcgatatttccctgaaccagcgcgacctgagtcgggtcgttgttcatctgataccactggtagttgcgggcgagccacggcgcgaacagcagtaccagcgccgggatcagcggacggatacggcgctgtgagagtgaaagagcaatcagcccgcttatcaccatcagcaggaaggtgatggcattcacacccaggattggcgccagtgcacgcatcgggccgtcaatctgggtatagccgaattccagccacgggaagccggtcagcacccagccgcgtaaaaattcagtgagctgccagagtgccggggcggcaatcaccagacgccagactgtggcgtgcgggaagcatttggccagcaggccggcaaacagcatcggatagagcgccagataggcagccagcaggacaacaaggaacaggttggcaatttccggcataccaccgaaatccgcgatactgacatacacccagtttacgccgctgccgaataaacccagcccccaggcgaaaccgatagcacaggcctgtttacctgtccggttgagagtcagcagcagcagggcggccagtgcgggcagtgagaaataccagagatcaaaaggcgaaaaggccagcgttccgccggccccgaaaatcagtgccagcagcagacgcggccactggcgtaaaccatgaggtgattttatcatgtcagattatcttcatctaaagacgggattggagcatcgtccggaatcttaacatgtaactggataattttacgactgtctgccatcgcaactttgaactggtagttgtcaatctcaatggtttcaccacgggtcggcagatggccgaaggcctgcatcaccagcccgccgacggtatcgacctcttcatcactgaagcgggtgccgaatgcgtcgttaaaatcttctatctgggtgagggcgcggacagaataggagtgcagactgagctggcggatatccacgtcatcctcatcatcatattcatcctcaatttcgccgacaattaactccagaatatcctcgatagtgacaagtccggagactccgccgaattcatcgatcacaatcgccatatgatagcgctgggagcggaactccttaagcagacggtcaacacgcttactttccggcacaacaaccgcctggcgcagcactttatcaatactgaactcttcggaatcactgcgcataaacggcagcaaatcttttgccatcagcaggccttcaatgtgatctttgtcttcactgatcaccggaaagcgggagtgggcagaatcaataatgacatccaggcactcgtcgagtgtctgattgcgcttgagagtcacaatttgtgaacgcgggatcatgatatcgcggacacgctgatcagaaatatccattaccccttcgagcatgtcgcgggtgtcaggatcgatcagtgcattttgttcggaatcacggatgacctcaacgaggtcttcacggcttttgggctcgccgtggaacagttgctggcgcagcagagaaaagaaaccctttttctggttcggtgtatcactacccgatggatggtcgtcgctcatggcggtttttttacattccccgatttaatgaaagatgccgtattatgtagcataaaaacggcatcgctgactacgctttttctgtgatatacggatcagaatagcctaatttttttaagatttccgtttccaggccttccatctcttctgcttcatcgtcttcgatgtggtcataacccagcagatgcaggcagccgtggatgaccatatgcgcccagtgttcttcttcggttttttcctgttcggcggcttcgcgctccaccacctgacggcagataatcaaatcccccagcagcggcagttcaatttccggcggcacttcaaacgggaaggagagcacgttggtcggtttatccatgccgcggtaagtcaggttaagctcgtggctttccgcttcatccaccaggcggatggtaacttcactctcttcctgaaacatcggcagcacgccgtcaatccagcgctgaaactgagcttcagagggcaggttgtctgtgttttcacaggcgatttgtaaatcaagaaccggattactcatgagattgttcctgctgcgcctgcgcgcgttcggcatcacgctgctgtttcagcatctgtttgcgtttctgttctgcggcttcccacgcttcataggcaataaccacttttgccacgataggatgacgcaccacgtcttcactgtgaaagaagttaaagctcagttccggtacatccgccaacacttcaatggcgtggcgcagaccggatttattgccgttcggcaggtcaatctgggtgatatccccggtgataaccgctttggagttaaagccgatacgggtcaggaacattttcatctgttcgatggtggtgttctggctttcatcgagaataataaaggcatcgttcagggtccggccgcgcatataggccagcggcgcgacttcaatcacgttgcgctcaatcagcttttccactttctcaaagccgagcatttcaaacagcgcgtcgtacagcgggcgcagatacggatcgactttctgactgagatcgccgggcaggaagccgagtttctcaccggcctcaacggcagggcgcgtcagcaggatgcggcggatttcctgacgctccagggcatccacagctgcagcaaccgccagataggttttcccggtcccggcagggccgataccgaaggtgatatcgtggtcgagaatatgggcgatatactgcgcctggtttggcgtgcgcggtttaaccacaccgcgtttggttttgatattgacggatttgccgtagtccggcacatgttcatcactctgttccagtacacggctctctgccacggccaggtgaacctgctccgggtcgatatcgcggatcacaccgcgcaccggggcggtttccacatagagctggcgcaggatagccgcagcggctttgacgcagtgcggtttgccggtcagccggaagcggttgtcgcggcggctgatttcggtgccgagacggcgctcaagcagtttgatgttatcatcgaagggaccgcagaggctttgcagacgctgattttcggcgggttcgaggaaaatttcctgtgttgctacctgtgaaggtgatatataggtctctgtcactgaatctctctgtgtattctcacgcgcaggtcattctgcgcgtgatcgttagttagtgtacggatggctgatagatgccgacacccagttcgtcttctttacgggtgcgggcaatcacggattccggggtttcgtgaacacgcaggttcatctgatcttctgtccggatcacgcggccgcgcagtgagttggtgtaaacatcggtaatctcaacatccacaaatttgccgatcatgtccggggtgccttcaaagttcaccacgcggttgttttcggtgcgtccggataattccatgacgtctttacgggacgggccttccaccaggatacgctgtgtggtgccgagcatctggcggctgtagctcatcgcctgctggttaatccgctgctgtaacaggtacagacgctgttttttctcttcttcggtcacgtcatccggcagatcagccgccggggtacccggacgcggggagtagatgaaactgaagctcatatcgaaattcacgtctgcaataagctgcatggttttttcgaagtcgtcattagtttctccagggaagccgacgataaagtcagagcttatcaggatatccggacgtgctttgcgcagtttgcggatgatggatttgtattccagcgcggtatgggcgcgtttcatctgggtcagaatacggtctgagccgctctgtaccggcagatgcaggaagctgaccagttccggggtatcttcatacacagcgataatatcatccgtgaattcaatcggatggctggtggtaaagcggatgcggtcgataccgtcaatggcggccaccagacggatcagttcggcaaaactgcagatactgccgtcaaacgccgggccacggtaagcattcacgttctgacccagcaggttcacttcacgcacgccctgagcggctaactgtgcgatttcaaacagcacatcatcacacggacggctgacttcttcaccacgggtgtaaggcaccacgcagaaggtgcagtatttattacagccttccatgatagaaacaaaggcggacgggccttcggcgcgcggttccggcaggcggtcaaatttttcgatttccgggaagctgatgtccacaatcgggctgcggtcgcctctgagtttgttgatcatctccggcaggcggtgcagtgtctgcgggccgaagacaatgtccacagccggggcgcggcggcggataaaatctccttcctgggaggccacacagcctccgacaccgataataatgtccggattcacatccttgaggtttttccagcggccgagctggtggaacactttttcctgcgctttctcacggatagaacaggtattaagcaggagaatatcggcttcatcggcattgtctgttaaagtatagccgtgggtgctttccagcaggtcagccattttggatgaatcgtactcattcatctgacagccccaggtttttatgtacagttttttactcgtcgacattttctcaatccgctgttttcagtgaaacaatacccgcaacactgaaaagcattgtgtgtattcaatcaggttttgatgtaaccaatggtcgatattgtagtcatttgacacaccagtgaccagacccggcagcacggatcttcacctttcccggtgaatttacggcaattgaacaaaaaatcaacgtattagaataggtatgtcatggataacccgttaacacattctgaagtcaccgttatcggcgggggaatgattggtgccgccacagccctgggactggctcaggccggttttggtgtcactgtggctgagttacaggcaccggcaccgttcgatgctcagagccgccctgacgtgcggatttccgccatcagccgcgcgtcagctgagttactggagagtctcggggtatgggagcgtgtccgtgccatgcgttgtgtgccgtaccgcactctggaaacttatgaggaaccagggtcggaagtaacctttaccgcagagagcctggggttacctgagctggggtatatggtggaaaacccggtactgcagcgggcattgtgggagatgatcaccgctcatgagctgatcacctgtctgtgcccggcacggttgcagagtatgacaaagcaatccggtgaatggttgcttacatttgataacggcgacgtaatcagttcccgtctggttatcggcgcggacggtgcgaaatcacaggtcagaacgctggccggtatcggcagccgcggctggcagtatcgtcagtcctgtatgttgatcaccgttgataccggacgtgagcagcaggatatcacctggcagcagtttttcccgtccggcccgcgtgcgtttctgccgctgtttgattcttatgcctcgctggtctggtatgactcaccagcgcggatccgccagctcagtaaactgccgctgccgcaactgcaggcggaaatccgcgcatcattccctgagcgtctcggagatgtcacgccgctggcctgcggctctttcccgctggtgcggcatcatgccgcctgttatgtacaggacggtctggcgctgatcggcgatgcggcgcataccatcaatccgctggccggacagggggtaaacctcggttaccgtgatgcggataccctgctgaataccctgatttcggcgcgggagtgctgtgaggactggggcagtgaatctgttctcagacgttatgagcgccgccgccgtcccgataatctgctgatgcaggccgggatggatgcgttttatctcactttcagtaataccctgccgggattacagccgttgcgtaacctggcactgacggtggcacaacgtgcaacaccgctgaaaaaactggcactgaaatatgcgctgggagtctgattacggattcaggcagggcaggtgattctcttctgcttccggggatggcggacagcaggcaaaaacgaaaagccgctgtaaacacatccgtgtgcgctcaggcgcgtcatccctgacgcgcatgcttttcgttgattttgcctgctgtcgcgcgttgcacattgagtacaatgaaatatttatccggattcagaaaagcaaaaagcccgtcagagacgggctttcagaatttggctggggtaccaggattcgaacctgggaatgctggaatcagaatccagtgccttaccgcttggcgataccccaaaagatagtggctgcaaaagatggtggctacgacgggattcgaacctgtgaccccaacattatgagtgttgtgctctaaccaactgagctacgtagccatcttttactgctttaacaaagccgtttttcagaatatggctggggtacctggattcgaaccagggcatgccaggatcaaaacctggtgccttaccgcttggcgataccccacctgaaaaacgaggcttatcatacttcatttttccactcagtggaagatggctggggtaccaggattcgaacctgggaatgccaggatcaaaacctggtgccttaccgcttggcgataccccatccggaaatataataaacaacaacgaatgtcacgagaaatggtgcgggaggcgagacttgaactcgcacaccttgcggcgccagaacctaaatctggtgcgtctaccaatttcgccactcccgcaaaaaagatggtggctacgacgggattcgaacctgtgaccccaacattatgagtgttgtgctctaaccaactgagctacgtagccatcttttttttgcgtgaccttcatcggcgttgcggggcgcattatgcggattacagccaaaagcgtcaactgctttttgcagatattttgatgaaatccgtttgtttgcctgcataataatcactttgaagataaacagtacaaaaaacaggataaaatcacggagttgacgcatttatccggtggcggattattccgccgtatccggtttattttccagaacatgcagcagcagttcaccgtacagcatcgcccgttttatcagggcaaatgccccgatagcggagttcggcggcagctgtgaaatcaccaccggcagatcctcgcggaaatttttcagcgactgcgtatttatgcagctttgcagagcagggagcagcacattttcagcggcagttatctcaccggcaatcaccactttttgcgggttaaacaggtttattgtgatggcaatggcttttccgagggaattaccgacctgttttatcacttctgccgcgagagcatccccccggttagcggcacggcagatggcgcggatggagcagttatccggcgtcagttcactctcaaatccctgagccagctggtgttttacccgggtttcaatggcggcatccgacgcgactgtttccagacagccgaagtttccgcagtggcagcgttcgccgagcggatctatctgaatatggccgatttcgccgagattaccacgccggttcagcaggatctgattgttgataatgatccccgccccggccccccggtgaatacgcaccagcagggaatccgcgcaatcgcgcgtggcgccgaaatagtgttcggccagcgcgaggctgcggatatcatggccggcatagcacggcagtttaaaatggtgatgaagattttcagtcagcggccagtcactgacagtaatgtgaggcatatagcgcacaataccgcgatccggatcgaccagtccgggcagtatcaccgcaatagcgataagctcgcggatgcggcgctggtgcgtctgtctgaagttgtcgatcagcgcaatgagtttagcttccgcatctgcctgagaagtggcttccaggggacaggtctcttcttcgagcgcccgtccgctgagatcaaacagtgcgatagtggcatcatggcggccgagacgcacgccgatagtctggaaggcgcggtgctcggaaataatggagatagcgcggcgtccgccggtggatgcctgctgatccacctcttttatcaggccgcgctcaagaagctgacgggtaattttggtcacgctggcgggtgccagctgactttgttcggcaatctgaatgcgtgaaatcgggccggaacggtctatcaggcggtaaaccaccgccccgttcagctgtttgactaaatcaatattacctatctgcggaattccgttacccatcggcgtcttttactcatgatgtatggaccacattcccgttaacgattgtcatacagacagaaaaatcagcggtgaaggcggtcaggttggcaatactgccggatttaatacttcccagtctgtcctgaacaccaattgcccgtgccggatagagtgtggccatgcgcagggtttcatccagcggaataccgacatgctgaacacagtttgccactgcgcggatcatggtgagtgaggaaccactcagtgtgccgttttcgtccacacataaaccatcacgataatatatcgttttgccggcaaagataaaatgatccagcccgctggttttcggatcaagccccgccggggcagtggcatcggtgaccaggatcagcttgtcgcgcttgagggctttactgttgcggatgttaggccaggaaacatgcaggccgtcagcaataattccggcatatatttctgaggtatcataaatcgcgccaatcagtcccggctggcggccggaaatgtacggcatggcattaaacaggtgtgtggagagggtgataccgttttcaaacccggcacgggactcttcataactcgcattggagtgcccggaggagaccacaattccggcatccgtcagtttgcggataacagagggttccaccatttccggcgccagggtgagtttggttatcacatctgcgttatcacacaggaaatcaatcatcgcggcatccggtttgcggatatagtccggattgtgtgtgccttttttcaccgggttgatgtaaggcccttccagatgcagtcccagcgcctgatttttatggtttttcagataatcacgcatggcgctgacactcagtttcatcagcgaatcggggctggtgatcagtgtcggcaggaaactggtgcagccggtgcgttcgttggccttttgcataatgtccagggtgcggaccgtgatatcgtcctcattgtcattaaactgtacgccgccgcagccgttgacctgcaaatcaataaatcccggggagaggatggcaccgcccagatcacgggtgtcaattccgtccggtaactcactgaccggacacacgctgtggattaattcgccgtcaataatgaccgcgtggttttccagacgatcgtgaccggtataaataatggcattggttaatgcgtacataacgcctcctgggggagagaatacttatttaaagataagacaacacaacaaaaaccgcccggataaagggcggtcagcagcggttattcagcagcaaattgttcgataatgtcagattcaaggtgacagaaatacttcagggttttcactttcagctcaagtgtggccggttcatcacacaccacaatggctttcgggtggatctgcacacaggtaatcgtccacatatgattcaccgagccttcaaccgcctgctgtaccgccatcgccttgttatggccggtggcgaggatcagcagttctttggcatccatcagtgtgccgacacctacagtgagcgcatatttcggcactttattgatgtcattatcaaagaaacgggagttggcgatacgggtttccggtgtcagcgttttgacacgggtgcgtgaagtcagtgatgagcccggttcgttaaaggcaatgtgaccgtcattaccgacgccgcccataaacagctgcacgccgccgtaagctttcatcttcgcttcgtagcgttcacattccgcatcggtatctggggcattaccattgagcaggttgatgttttctgctgggatatcaatgtgattaaagaaattctcatgcataaatgagtgatagctctgcggatgggattccggcaggccgatatactcatccatattaaaagtcaccacatgacggaaactgacttttccggcctgatgcagggcgatcagcgccttgtaggtggccagcggggtgccgccggtcggcagtcccagaacaaacggtcgttctgccgtcgggcggaacgcattgattttgtcagcgatgtactgtgcggaccactgaccgacatcctgcgctttcgcaagagggattaaacgcatatcgattctacctcgttaagttataccgggttatcggcccggtatctgctgtgctgtctcaggaagatccttcctgtctcatctatagcatgaatacccggaatttattagtcacgggagagaatacagccgccggaaaagatattttttatcttaaaataagttttgtgtgactgccagcattttaaccagccggtgacgaatattggtgacaataatcacaaatcacagctatttaatttgcgaagcgaaataaactttttagactgatacgtatagttggcagtaaaataagtgttacgcaatccggtgagtgatcagaccggttgttacaaattcagttgtacacaataaggcagccaatcatggctgtgataataatgctgtaaaacaaaaaggccgttcgtcagggcggcaagggggagtgagtgggtatactgaactatctgcagcggattggccgggcactgatggtgcctgtcgccacattgccggctgcggcaattctgatgggggtcggctactggatcgacccgacgggctggggtgcggacaacgtggttgccgcgttcctgattaaatccggtgcggctatcattgataacatgtcaatgctgtttgctatcggtatcgcttacgggatgtcaaaagacaaagacggtgcggcagcactgaccggttttgtcagctttatggtggtgaccaccctgtgttccaccgcgacagtcggtatgattcaggggatccctccggaagcggttccggcggcgttcggtaagatcaacaaccagtttatcggtattctggtcggtgttatttccgccgaactgtataaccgttacagcggtgttgagctgccgatggcattgtcattcttcagcggccgccgtctggtgcctatcctggcatcattcgtgatgatcctggtggctgcggtactgatgtatgtctggccggtcatttatgatgcactggtttccttcggtaagagcattaaagacctgggcgcgtggggcgcggggatttacggcttctttaatcgtctgttaattcctgtcggtctgcaccatgcactgaactccgtgttctggttcaacgtggcagatatcaacgatattcctaacttcctggccggtcagcaatccattgatgccggtacggcgattccgggtgtcacaggccgttatcaggctggtttcttcccgatcatgatgtttggtatcccgggggccgcgctggcgatttatcactgcgccaaaccggaaaacaaagcaaaagtggccggtatcatgatcgccggtgcatttgccgcgttcttcaccggtatcaccgagccgattgagttctcctttatgttcgtggcaccggttctgtatgtcatccatgccttcctgaccggtatctccctgtttatcgctgcaaccatgcagtggatttcaggtttcggctttagtgcggggctggtggatatggcgttgtcttcacgcaacccgctggcaaccaactggtatatgctgatcctgcagggcctggtcttcttcgcgctgtactatgtggtgttccgttttgttatcaccaaattcaacctgttaaccccgggccgtgaagcggcgatggcaaccaacgataccgttgatggttacagtgagaatgtcagtactgataataaaaaagatgagaaaaaatccatcagcagcgaagcacgtcagtatatcgcggctatcggcgggtcagataacctgaccggtattgatgcctgtatcacccgtctgcgtctgactgtaaaagactccgcgcaggtcaatgatgcttatgcgaaacaaatcggtgcttccggcgttatccgtctgaataaagagagtgtgcaggtgattgtcggcacccgtgccgagctgatcgccaacgcaatgcgtgacgtgctgaaagaaggcccggttgcggcagctcaggctgcggcggcggctccggaagctgtgaaagccaaagcacagggcaatggtaacgtggtactgacgctggtggcaccattcgacggtgaagtggttgatttatccgctgtaccggatgaagcatttgccggccgtgttgtcggcgacggtattgccatcaaaccggaaagtgacaccgtatatgccccggcggcaggtactgtggtgaaaattttcgataccaaccatgcattctgcctggaaaccgataatggtgcggaaattattgtccacatgggtattgataccgtgaatctgaacggtaacggttttacccgcctgattgaagaaggcgcacaggttgctgccggtgatgcggtgctgaaactggatctggcgtatctgaacgaacatgccaaatccatgataagcccggtaatcatcagtaatatcgatgattatgatcgcgtggagattgttgccaaaggtctggttaaggcaaacgaatctgagctgtatcatgtcattaaataagtgattgcggttatgataataacgggaggcagctgcttcccgtttttttatctgttttttgcgcgaaggcatctgcccggctgatatttctgtgctcaggtggttgtatatgagcgcatcatatcggatgataagaggttattaacgcgcatattgcattgaggaattatgacaatgaacgaggctgatgcccgcccgacaaactttattcgtcagattattgacgaagacctggcttccggaaaacataccacggttcacacgcgcttcccgcctgagccgaacggttacctgcatattggtcatgcgaaatcaatctgcctgaatttcggcattgcacaagactatcaggggcaatgcaatctgcgttttgatgacaccaacccggttaaagaagacgtggaatacgttaattccattgaaaacgatgtcaaatggctcggttttcagtggagcggcaaagtatgttactcctccgactatttcgacacgctgtacaactacgccgttgagctgatcaacaaaggcctggcgtatgtctgcgaattaagtccggaagagatccgtgaataccgcggcaccttaaaagagccgggccggaacagcccgtaccgcgaccgtactccggaagagaacctcgcgctgtttgaaaaaatgcgtgacggcggctttgaggaaggtaaagcgtgtctgcgtgccaaaatcgatatggcatcctcctttatggtgatgcgtgatccggtcatttaccgtattaagtttgcgactcaccatcagtccggtgacaaatggtgcatctacccgatgtacgatttcacccactgtatttctgatgcgctggaagggatcacccattcactctgtacactggaattccaggacaaccgccgcctgtatgactgggtgctggataacatcactattgactgccatccgcgtcagtatgagttctcccgcctgaatcttgaatacactgtgatgtccaagcggaaactgaatcagctggtaacagagaaatttgttgaaggctgggatgacccgcgcatgctgaccatttccggtttgcgccgccgtggttataccgctgcctctatccgcgagttctgccgccgtatcggtgtcaccaaacaggacaacaacgtcgaaatggcggcactggaatcctgtatccgtgatgacctgaacgaaagcgcaccacgcgccatggctgttattgatccggtgaaagtcgtgattgaaaacatgccggaaggcgatgtgatggtcaccatgccgaatcatccgaacaaaccggagatgggcagccgcgaagtgccgttcagccgtgaaatctggattgatcgcgcagacttccgtgaagaagcgaacaaacagtacaagcgtctggtgctgaataaagaagtgcgcctgcgtaatgcgtttgtgattaaagcagagcgtgcggaaaaagacagcgaaggcaatatcaccactatctactgcacctatgatccggaaaccctgaataaagatccggctgacggacgtaaagtgaagggcgttatccactgggtcagcgtgaaacacgcggtaccggcggaaatccgtctgtatgaccgcctgttcagtgtaccgaacccgggcgcagaggatgatttcctgtcgacgcttaacccggattctctggtgatccgtcagggctttgtggagccgtcactggttgccgctgacagcagcaagccgtatcagtttgagcgtgaagggtatttctgtgctgatgccaaattatcctcagcggataaattagtctttaaccggactgtcggcctgcgtgatacctgggcgaaaattgagagtaaataacagataacacagtgttattaatataaaaaagccgttcgcaggaacggcttttttgtgtgcatgtgttctgaaaaacggcaacaaaaaaggcgcgatacgcgcctttcatacaaaatggttaacggcgagaattattttttctcgtcgtggataccttcatcagaacggcagtcaccatccgcacagtggccgtacaggtacaggctgtggttggtgagtttaataccgtggcgttccgcgatatttttctgacgtgattcaatggattcatcactgaactcaatcactttaccgcaatccaggcagatcaggtgatcgtggtggtgttgctgggtcagttcgaaaacggatttgccgccctcaaagttatgacgggtgacaataccggcgtcatcaaactggttcagaacgcggtagacagttgcgagtccaatctcttcaccgatatcgatcagttttttgtagagatcttccgcactgacgtgatggcactccggatcctgcaacacttccagaatcttcaggcggggaagtgtgactttcagtcctgcatttttcaatgctttattgttatcggtcatgcggatttagtcctatattgtcgctggtgagcgcacattcgggaaaacgctcaacggctgaacacaatgtccggctatcaaaaggtgtcaggtgcgattcgcctgaccgatgccggaccggataaataatatcattacataaataagcagaattatcattcgcaatttaagggaaaaccttaaattgccagaatctcgtcaagactcatttcttcgcggatctgctcaacccattttgccacgcgttcgttagtcagctccggctggcgatcttcatcaatagccaggccgataaagtgactgtcgtccgccaggccttttgactcttcaaagtggtagccttctgtcggccagtggcccacaatggtcgcgccgcgcggttcaatgatgtcacggatggtgcccatggcgtcacagaaatactctgcgtaatcctcctggtcaccacaaccgaagatagccacaattttaccgttaaaatcaatttcttccagtgtcgggaaaaaatcatcccagtcacactgtgcttcgccgtaataccaggtcgggatacccagcagtaagaaatcaaacccttcgatgtcctctttgctgcacttggcaacatcccggacttcagcaacgtcatcgccgagtaatttctgaatcattttagcgatattttctgtgttaccggtgtcactaccaaaaaatatacctgcgattgccataaataagcctctcaaccgaaaatctctgtgcctgcaaaaggacgccgcagcgacaacaagcagaaattataactatttcatcttcataaataccattctgacgaaaacagtatttgaagtctgtcaaatttgtgtggtgtgtcgtctcacaatttggtgcataaatcagaacgctgaaggtaatcaagcagaatttgctcgataagttcgccccggttcacgttttcttcgtatgccagctggttcagggcatcgacaatatccgcattcagtttgagctcaacgcggcgtaatccgttaactttgtcacgccgcagctgattgcgtttgttaatccgcaactgctcatcacgggagagcgggtttgttttcggtcgtccgggccggcgttcgtcagcgaacaaatccagcgtggtacgatccgtttgttctttggccataattttactacgaaaaggcggattacaatgataaacgcgcaatgatacaccgccatcccgcttaccgccaccgcttcgcggcctgttaccgcggatttcgtgcagattgattaacatcgcaccgtctgcccgcctgtgcggcagccctgcaggacgggtgatgggtttcgtcaatgaattaaatattgcaattatcgttatgaatatattagaaaaaaaagagtattcagctcaggataacggagtgtttttgcgggcaggcattacgtagtatgtattttcagcaagggaataacagaggacgcgcacatggatcgtatctcagaatctgcggaattatcgcggatgtcgcacaaaaagtatcactacggctgcaaagtaaagcagatgctgacggtgtttatccgtccgcttcagtatttgtgtctgattttatccggctgctgcctgctggatatctgttttgatctgccggggcaggatgtcagacatcaggtgcgttctgttgtggcctggtggcaggagagtgacgatgacagtctgatactgagtttccgtcagtgaatgatgccgccgtgacggcggcactgctgtcaggctttatccaggaaacggctgatggcgcgcagaaccgcgtccggtttttcagcgtgtacccagtggccgcatccggcaatcacatgggcggttgcctgcgggaactgcgccataatggcgtcgcggtattccggtttcacatacgatgaattaccgcccgggataagcagcagcggaacctgttgcggcggcagggtttcccagccgatgatggattcatactgtgctttgataaccggcagattgaatttccattctccctgcttaaaggatttcagcaggaacggaataacgccatcctcacggatgcggcgcgccataattgcggtggcctcagtgcgtgtggtgacaccggcggcagtaacatcttccagtgccgcgataatctcatcatgacgacgtacaccgtaagcgacgggagccatatcaataacaatcagtttttcagtaacatccggagccagtgcagccagcgccatggcgatttttccgcccatggaatggccaatcactattactttttcaatgttcagggagcggataagatcaagtacatcctgcgccatttcccggtaagtcatggtttgtgcgcgcggtgaatcgccgtggttacggacatcaatctgtaccacggtatgcgttttccgcagttcacggccaagcaccccgaggttatgcagatccccgaacagaccgtggatcagaacaatgggtgtggtgtgatgtgatatttcaggcgtgaatatttcatgatgaagtaatgcaggtaatttcatattaacaaccgatccgcagagcaaaacaggcggatatgatgacacggcagcccccggaaaccaacatgttaagtaaatgtttctgtgattgattgtgcgtccggaaacgataacttactgatttattttttaaatgccgtacggggcaaactgcgggggtttttagtttaagttattgaaattttacttgttttgttttgcatttttctatcttataataacgtgttccgcgttaacgaataaaagaaccgggtagaaatgaaaacaatcgatgtagatgaagaactttacagttatattgccagccacacacagcacattggtgaaagtgcatcggaaattttgcgccgtatgctcaatttagggccgcaggctccgggtaccacctgcgcacctgttgcaactgacagcgcggataacaaaactccgccggttaccccgcgtccggtaaaagccacttctcaggatccggtccgcgtcatgcgcgaactgctgctgtccgacagctatgcagagaaaaagaaaacgatcgaccgttttatgctggtgttatccgtactgtataatattgatccgcaagggttcagcaaaagcaccgatgaactccacggccgcacccgcgtctatttcgccggtgatgagcacacgctgctggccagcggtaaaaccagcaagccgcgccacattccgggcacgccgttctgggttatcaccaacaccaatactcagcgtaagcagagcatggtagaacagattatgcagggaatgggcttcccggcaaatactgtcgagaaagtctgcaataccctgtaaggggtatttatctgccggtgacggcataatcaggggagaatgacacagtggctcatacgcacccgcgggctggtcagcctgcgcaacaatccgatttaatcaatgtggcgcagctaacctctcagtattatacccttgcacctgatgcggcggatccggcacagcaggtcaaattcgggacttccggccaccgcggcagtgcggcgcgcggtagtttcaatgaagcacatattctggcggtcactcaggcaatcgccgaaatccgtcagcagcagggcattaccgggccgtgctatgtgggtaaagatactcacgccctctctgaagcggcatttcagacggtgttatccgtactggccgcaaatggtgtccgcgttattattcaggaaaataatggtttcaccccgacaccggcggtgtctcatgccatcctgacttacaaccgcgaccatgctgataaagcggacggcattgtgatcacgccgtctcacaacccgccggaagatggcggtatcaaatacaacccgccgaccggcggcccggcagatactgacctcacctctgttatcgaaaagcgcgccaatgagctgctggccggtaatatggcgcaggtgaaacagataccggtgtgtgatgccctgcgcagcccgctggtcagcgcggtgaacctgattgagccttacgtcagttcgctcagtgacgtgatcaacatggatgctatccgtaacgcgaaactcaaaatcggcgtggatccgctgggtggtgccgggattgagtactggaaacgcatccgtgatttttatgatctggatattgagctggtcaatgagcaggtggatcagacattccgctttatgccgctggatcacgacggggttatccgtatggattgctcctcaaaatgggcgatggcgggtctgctcagcatgcgtgaccgcttctcgctggccttcgccaatgacccggattacgaccgccacgggattgtgacaccgaaagggctgatgaatccgaaccattatctggcggtggcgattaactatttatttcagcaccgtccggactggccggcctctgtcggtgtcggcaaaaccctggtatccagtgcgatgattgatcgcgtggttgccgatttgcagcgtgatctggtggaagtcccggtcgggttcaagtggtttgtggacgggctgtataacggcacactgggcttcggcggggaagagagcgcgggggcttcgttcctgcgctttgacggtacaccgtggtcaaccgataaagacggtattatcctctgcctgcttgcagcggagctgaccgccgtgaccggcaaaaacccgcagcagcattatgatgagctggcggaaaaattcggttcaccgtgctacagccggatccaggcagcggccagtcatgcggagaaatcccggctgtcaaaactgtctccggaaatggttactgcagataccctggccggtgatccgatcaccgcccgcctgacagccgcgccgggtaacggtgcgtcgatcggcggcctgaaaatcatgagtgagcaggggtggtttgccgcgcgtccttccggtacggaagatgcctataaaatctactgtgaaagtttccggggtccggaacatctggtacagatagaaaaagaagccattgaaatagtcaaccaggtgattgcggactgacgcattccccggaaaagctgcgcggagcggatcttcccctccgcgttttttttgcctgtctcagcccagagcaaccatcagcgcaccaacggtgatcagcgcaacgccaccggccgcaatcatagaaattttttcaccgaacaggatcacggcaaaaatcacagcaaaaaccacactcagtttatcaatcggggcaacctgagaaacctgaccgttttttattgccataaaatagaacagccaggaaagtgccccggcaatcccgctcagagcgataaagaacagggctttacggttttcgattatctcactgataagattaagttttccctgaaccaccaccacaccgaccagaaacagcgccataatcactgcacggatcgcggttgcggtattagcatccagatgctgcagccccattttcccgaagacagcaaccattgcggcgctgatagcagacagcagggcatagatcagccaggtactcataataaataattcccattatcaattagtgatgtgaatatcataaggtattttcattagcgtggtagcttaattttgaataataaaattgttaataaaatgataaaaaataacaattatgtaatttaattacttaaaaggggcattttgtgcgtatcataccggtgtcaagtggtcagatgagtggtaaagtttcaccagttgggttaatatgaaagcgaaatacattcggtgattattgctgttctgcgataatccgttattaaggagggtctcaatgtcaacatttcaggtatatccgttgcataaggttctcttgcgccgtaccggtgcagtatctttaggtatcctggcgttcccgtttatgctgttctaccgggatcgcgcccgcttctggagctatctgtaccgtgtgtggtccaagacaagcgataaaccggtctggctggcacgttcagaaaatgcggtaagcagtacccagcagcactgataccggcatccggaaagcaaaagagacgcccggcgatgttatcgcggggcgtttttttatgtctgcaaattgctattggcgggcagggaaggtatggtaaatctatccgcacggacaggaaaaatgtatgaatcatattgaattagaacagattattaatgaaaagctggcagtacaggattttcaggattatgccccgaacggtctgcaggttgaaggacgtgaacaggttcagcgcgtggtgaccggcgtgaccgcctgtcaggcattactggatgaagcggtgagactgaatgcggacgcggtgctggtgcatcacggctatttctggaaaaacgagccggtcagtatccggggcatgaagcagcgccggatcaaaacactgctgtgtaacgatatgaatttatacggttatcatctgccgctggatgcccatccggaactgggaaataacgcgaaactggcgcaactgatgggggtcacggtcaccgggcaggttgatccgctgcttccgtgcggtgagttcgcgcaaccggtcagcggcgaggaactggtgcagcgtttacagcaagggctggatagggagattctgcattgcggggataacgcgcctgctcagattaaaaaactgggctggtgtaccggcggcggtcagagttttattcaggcagccgcagatgcggggcttgacggctttgtgaccggcgaggtatcagagcagacaatccatatcgcccgtgaatgcgggatgcacttctttgccgccggtcaccatgccaccgagcgcggcgggatccgtgctctgggtgaatggctgcagaaaacgcacgggctggatgtgatttttgtggatatcccgaacccggcataacgggtaacaggaaaagccggtcagaagaccggcttttccttatgttgtttgtgtgctttgtactgtcttgcgcggtgcacagagcagtgttcccgcagcacagacacacagtgtcaggccaagatgctgactcagcccggccagtgccagtccgccgccaatcagcaggtaatacatcagaccgagcagcgcaccggcagtaccggggcggtcacggtaatcctgtaacacaccggccagaatattcggaatggcgagcccgtaacaaatcacgatacctgttaccggcagcacaaacaaaatcgatcctgacaacagccagaccgcagcagcgctgaccataccggttacggcagcaaggcggatcagtgaatggctgtgccatccgcgtttaagcaggacacggttgatcacagagcctgcggccacgccaagcgcgagcagtaatccgctgtaaccgaattcctgttgtgtaaagcccagcccgctgaaataaaatggtgctaactggtagtagctgaacaggctgatattcagaaaggcaatcagcagcacattgcgcagaataaagcggtcacacagcatacggccggctgtttccggcagcgaaactgacgtgatatgtgccggacgtgtttccggtaaccggagtgctgtccataccagcagaacaaccgccagtaccgcaagcccggtaaagacgccctgatatccggcaaaaccggtcagcaacgcgccgctgaacatgcccagtgccgggctgacagccagtgctatccccatgacagagaatacttttgccagctcatccccgcggtaacagtcacgcatgatggtttgtgtgccgactgagccgaccgccgccccgaaggcagacagcatccgcaggatcagtaacacgctgaaatcctgtgtgataaccgcgccgcagtaggcggcagcgtaaagtatcagaccgctcagcatggtgcgtctgcgcccggcgatatcacataaacgtccccaggtgaccacgccgagtgcgaaggcgaaaaagtacagggacagagtctgtcctgcctgtgccgcactgacgccgaatccctgtgcgatatctgtcagcgccggactgtagatggtttccgctatctgcgggaacatcatcagggcaacggcaagtgttaatgcgggtttttgtattgtcattttgtcccccttttttgtaactgaaatgaacggggagcagattagcaaaaggcgggatgtcttattataataataaggacattctgtttatcaaaagggacaacatggcgtggctgaagcaaagtgatgcatttgatgcggacaactattccgcgccactgattggcattgccgcagagatggcggcacagcatgattccggttttcactgccatcagcgcggacaattgctgtttactgagcggggggcgattcagattaccctgacggacacgctctctgttctgccgccgacgcgggtagcgtggatcccgccgcagatgctgcaccgtgcacaaatgtttgaggctgtcggttaccgctcactgtatccggatgcgcaactcagcgcctgtctgccgccaacctgtgaaatcttcggcgtatcgccgctgctgcgtgagatcctgtttctctttgccggactgccgtttgacagtgactggacacaaccccgtttacagcatctgctgccggtatttctggatgagctggcgctggccgggcgggaagatatgcagttaccgctgccgtcggaccggcggctgaaaaccctggatccccggatactgccgccgcagcttaatgagctggcatcccgctgcggtgccggggaaaagacgataacgcggattttccggcgggaaaccggtatgagctaccagcagtggcggcagcagtggcgattaataaaatctgttgaacttttggcgaaaaaataccgcagcagtgatattgcacaggctctcggatttgccagtgacagcgcgtttgtctctttcttccgtaagatgaccggaaaaacacccggtgaatatatgggtaaatgaatagccgggagttaaaaatgcataaaaaaaccctccggagagggttttataaggattaatacggtattgtcacgatgaacagcgtttggtgactttggtttcaaacggacgctcagtgtaaccggtataaagctggcgcggacgggcaattttcaggccgtcgtcgtgcatttcgctccagtgggcgatccagccgatggtgcggccgatagcaaagattaccgtgaacatatttgacggaatacccagcgctttcaggatgataccggagtagaaatccacgttcggatagagtttcttctcgataaagtacgggtcgttcagtgcgatacgttccagctccatcgccacttcgagcaggctgtcattcaggcccagttcgttcagtacttcgtgacaggtttcacgcatcactttggcacgcgggtcatggtttttgtacacgcggtggccgaagcccatcagacggaaagagtcatttttatctttcgcgcgctcaataaaggccgggatgtgatcgacggtctggatctcttccagcatacgcaggcaggcttcgttcgcaccgccgtgagcaggtccccacagggaggcaataccggctgcgatacaggcgaacgggttggcaccggaagaaccggcggtccggacagtggaagtggaggcgttttgttcgtggtctgcgtgcaggatcaggattctgtccatggcacgttccagcaccggattaaccacatactcttcacacggggtggcaaacatcatacgcaggaagttaccggcgtaggaaagattgttcttcggatagacaaacggctgcccgacagaatatttgtaacacattgccgcgacggtcggcattttggagagcagacggtaggccgcaatttcgcggtggcgcggattgttcacatccagcgagtcatggtagaacgccgccagtgcgccggtcacgccgcagagcacggccatcgggtgagagtcacggcggaacccattgaacaagcgggtgatctgctcgtggatcatggtgtggcgttttacggtttctttaaattcgtcgtactctttctgatcaggcgcttcgccatacagcaggatgtagcacacttccagataatcagatttcatcgccagctcttcaatcgggaagccgcgatgtaacaggataccttcatcaccgtcgatatacgtgatttttgattcacaggacgcagtggaggtgaagccgggatcaaaggtgtagtagccttttccgccgagcgtccggacatcaactacgggctggccgagagtcgggctcaggatatccagatcagtaaccctgacgccgtttagtgtcagctccgcctttgtattagacatgtaggtctccttagcgcatttattatttgtttttcaatcttattgtgataacccctgatgcgttacctgaatggataccgtacctggtgttacgttatccggtacggtgcatgacgggttatcagattgttaatgaaactttgtgttgcgataaaagttatgttgtacagcaagatattgtgcattttttgcaagttacacttttgcataagtttgcacttacgggaagtctttcttaccggtaattgccgttttaatttttgtatttaaccacataatgtaattcaaatgttgtcagaatgtcacaagtcataataatgggcgtttttattgtgtgaaccgtgatcttattcactgttctggctaaatctgaccaaacattttgtatgggaattgtaatcatattgtgaagtccatatactgcctcaaggtctccggaattccctgaagcaggagcacccagcgtaactgaatcattacttttgtaaaacaatacggatgttgattttacttaaggattgttcttatttccccagcgctgtctgatttccgcccgggtccggaggaaggaaaaataataaagagctgtgtgggcaaaattgtgaaaaaacaacgacctgtcaatttagacttgcagacgatccactttccgatccctgcaatcgcttcaattttacaccgtgtctcaggcgtcattaccttcattgctgtagcgattctgctgtggttattagggttgtcgctgtcctcgccggaagggtttgcgcaggctgctgatatcatgagcggtttcttcgcgaagtttatcctctggggcatcctcactgcattggcttaccacatctgtggtggcattcgtcacatgttaatggatttcggatttgttgatgaaacgctggctgccggtatttcatccgcgaagatttccatggttctgactgtgattttagccgtgttggcgggggttctggtatggtgaaaaattcaaaaatcagtgcgaccacgctcggtcgtaacggtattcaggattggttaattctgcgtgccagcgccattgtgattacactttatgtactctacctcgtcggttttgtggcttttacctctgacatcacttatgacgtctggtacagcttctttaccgcttcattcactcaggtgttcaccaccctgacactgatcgccattctcgcccatgcctgggtcgggttatggcaggtactgacggattacgtcaagtgcctgagcctgcgcctgctgctgcaatttattatcattattgtgctggcagcctatgtcatttacggttcaatcattgtgtggggtgtctaaatgagcttacctgtcagagagtttgacgcagttgttatcggtgcaggcggcgcaggtatgcgcgcggcacttcagatttctcagtccggcctgtcctgtgccctgttatccaaagtgttcccgacccgctctcatacagtatccgcccagggcggtatcactgtggcgctggggaatacccatccggataactgggaatggcacatgtacgacaccgtaaaagggtcggattacatcggtgaccaggatgctatcgaatacatgtgtaaaaccggcccggaagcggtgctggaactggagcacatggggttaccgttctcccgtctggacgacggcagtatttatcagcgtccgttcggcggacaatccaaagatttcgggggcgagcaggctgcacgtactgccgctgcggctgaccgtaccggtcacgcactgctgcatacgctgtatcagcagaacctgaaaaatcacaccacgattttttccgaatggtatgccctggatctggtgaaaaaccaggacggcgccattatgggcaccaccgctatctgtatcgaaaccggtgaagtggtctatttcaaagccaaagccacgattctggcgaccggcggtgcggggcgtatctatcagtccaccactaacgcccatatcaacaccggtgatggtgtcggtatggcggtgcgtgccggtattccactgcaggatatggaaatgtggcagttccacccgaccgggattgccggtgccggggtactggttactgaaggctgccgtggtgagggcggttatctgctcaataaagacggcgaacgctttatggagcgctacgcaccgaacgctaaagatcttgccgggcgtgacgtggttgcccgttctattatgatcgaaatccgcgaaggccgtggttgtgacggcccgtggggaccacatgccaaactgaaactcgaccatctgggcaaagaagtgctggaatcccgtctgccgggtattctggaactgtcccggacattcgcccacgttgaccctgtcaaagagccgattccggttatcccgacctgccactatatgatgggcggcatcccgacgaaagtcaccggtcaggttgtgaccatgaatgagcagggtgaggatgtgctggttccgggtctgtttgcagtcggtgaaattgcttgtgtttctgttcacggtgcaaaccgcctcggtggtaactcactgcttgacctggtggtcttcggccgttcagccggtctgcatctgaaagaatccattctggagcagggcgcaatgcgtgatgccggtgaatcggatatcgatgcggcactggcgcgtctgaaccgctggaataacacccgcagcggtgaggatccggttgctatccgcaaggccctgcaatcctgtatgcagcacaacttctcggtattccgtgaaggggatgcgatggccaagggactggaagagctgaaagccattaaagagcgtctgcagtatgcgcgtctggatgatacctcatcagaattcaacacccagcgcatcgagtgtctggagctggataacctgatggaaacggcgtattccactgcaatggccgccaacttccgtactgaaagccgtggtgcgcacagccgttttgactatccggatcgcgatgatgcgaactggctgtgtcattccctgtacctgccgcaatctgaaaccatgacacgccgtgcggtgaacatgcagcctaagctgcgtgacccattcccgccgaagattcgtacttactgatgtgtggtgatgaggcatttgcggagagaatactatgaaagttgaattttcagtttatcgctataacccggatgtggataacgcaccacacatgcagaactatcagctggatgtggaagaaggccgggacatgatggtgctggatgcactgattctgctgaaagagcaggatccgagcctgtcattccgccgctcctgtcgtgaaggggtgtgtggttctgacggtatcaatatgaacggcaaaaacggtctggcctgtatcactccgttgtcggcgctgatgaaaggcggtaaaaaagtggtgatccgtccgctgccgggcttaccggtggtgcgggatctggtggtggatatggggcagttctacgcgcagtatgaaaagatccgcccgtatctgatcaacgacaacaaaaacccgccggcgcgtgagcatttacagtcaccggcgcagcgtgaaaagctcgatggtctgtacgaatgtatcctgtgtgcctgctgctcgacatcctgcccgtccttctggtggaacccggacaaatttatcggcccggccggtttattagccgcgtaccgcttcctgacggacagccgcgataccgagacagaatcccgtcttgacgacatcagtgatgctttcagcgtattccgctgtcacggcatcatgaactgcgtcagtgtatgtccgaaagggctgaatccgacaaaagcaattggtcatattaaatcaatgttactgaaacgcagtgcataattgactttattctgcttaagcgattgataataataagatgcctgcccggcaggcatcttttaccaacccgtaacaataggcataatctatcgcagtaagtgttagaagcgacaataaatgtagttaattgtgattaagatgtgagttttttggttcaaatgtaagtatggttatagacagtacagggatcttcagcaacggttattccgttgctaaaggttcctcagggatacacagaacataagatgcacaagcaccacccgggaatcctttacgcaccgcaatgtatcgcggtattagttatcacggcgaaaactaaacccggcctcattcaggttgcagggcagcggcagacggggaatccgcagaacagagccactctgttttccggacggacacgcagccggtagaccgcagccgggaagacaacggggatgaagctctaagcttaagggatcataatgcagaacggcgcactgaaggactggctggattccagctttctggctggagaaaaccaggcctacatagaagatatctatgaagactatctgaacgatccgtcctccgtcgatggaagttggcgggagattttcgactcactgccgaaagcggacatcacagaacaacctcattcacagacgcgcgactacttccgtcgtctggccaaagattcgacccgctaccacacctccgtcagcgatccggcgatggattccaagcaggtcaaagtcctgcagcttatcaacgcattccgcttccgcggtcatcagaatgccaaccttgacccgctcggcctgtggaaacaggaaccggttccggatctggacccggcgttccacaatctgaccaaagccgattttgatgaaacctttaacgtcggttcttttgccatcggcagcgaaaccatgcggctgagcgagttgtttgatgcattaaaacgcatttactgcggctccatcggcgctgagtatatgcatatcaccaataccgaagagaaacgctggctccagcaacgtctggaatccgttgacgtcagtaagctgttcagtgctgatgaaaaacggcgtttcctggcggatctgaccgcagccgaagggctggagcgctatctcggggcgaaattcccgggcgcaaaacgtttctcactggaagggggcgattccctcattccgatgctgaaagacctgatccgtcatgccggtaagcaggacacccgcgaagtggtgctgggtatggcacaccgcggtcgtctgaacgttctggttaacctgttcggtaaaaaaccggcggatctgtttgatgagtttgccggtaaacacaaagatcatctgggtaccggtgatgtgaaataccatcagggtttctcgtctgacttcgtgacagaaggggctcaggtgcatctggcactcgcctttaacccgtctcaccttgagattgtcagcccggtggtcatcggctctgtccgcgcccgccgcgaccgtctgccggaaagtctgagcaaaatggttctgccgatcaccattcacggtgactcagcggtaaccgggcaggggattgttcaggaaacgctgaacatgtcacaggcacggggctatgaagtgggcgggactgtccgcattgttatcaataaccagattggtttcaccacctccaacccgaaagatacccggtcaacggaatactgtactgacatcatgaagatggtacaggcaccgattttccacgtgaatgctgatgatccggaagctgtggcattcgtgacccgcctggcactggatttccgtaatacctttaaccgcgatgtgatgatcgacctggtctgctaccgccgtcacggccataacgaggcggatgagccgagtgcaacccagccgatgatgtaccagaaaatcaaacagcacccgacaccgcgtaaaatctacggcgataaactgattgccgaaggtgtggtcgctgccggtgatgtgactgaaatggtcaatatgtaccgtgatgcgatggatcgcggtgactgtgtggtggaagagtggcgtgaaatcggtaaagcagcgcttacctgggaaccgtacctgaatcacaactggaacgacagctacgccaataaagtggaactgaaacgcctcggtgatctggcgcgccgtatcagtaccgtgccggaagaagtgcatatgcacccgcgtgtcgaaaaaatctataccgaccgtgcggaaatggcggaaggtaataaactgctcgactggggtgcggcggagaatctggcttacgcaacactggtggatgaaggtgttccggtgcgtctgtccggtgaggatgcgggacgcggtacgttcttccatcgtcacgcggttattcataaccagagcaacggctcctgctatgtgccgctgatgaatgtccataacgcccagggacgcttcaatgtatgggactccgtcctgtctgaggaagcggtactggcctttgaatacggctatgcaaccactgacccgcgcggcctgactatctgggaagcccagtttggtgacttcgccaacgtggcacaggtggtgattgaccagttcatcagctccggcgaacagaagtggggccggatgtgcggactggtgatgttactgccgcacggctacgaaggccaggggccggagcactccagcgcccgtctggaacgctaccttcagctttgcgcggaacagaacatgcaggtctgtgtcccgtcaaccccggcacaggtttaccatatgctgcgccgtcaggcactgcgcggtatgcgccgtccgctgattgtcatgtcaccgaaatcactgctgcgtcacccgctggcggtctcttctctggaagaactggccgaaggtcactttgaagcggttatcggtgaagcagatgatctgaatccggcagatgtgaagcgcgttgtgctgtgttccggtaaggtttactacgatttactggagcagcgccgcaagaataatcagacggatgtggcgattatccgtattgaacagctctatccgttcccgcatgaagatatacatgcgattcttgcaccattcagccatgtgaaagattttgtctggtgccaggaagagccgctcaaccagggcgcgtggtactgctgccagcataatttccgtgatgcggttccggcaggtgcggcactgcgttatgcgggccgtccggcatccgcctctccggccgtgggttatacgtctgttcaccagcagcaacaacaagagctggttaatgatgcactgaacgttgaataaattaaggaaaagcaatgagtagcatagaaattctggttcctgatctccccgagtctgttgccgatgccaccgtggcaacctggcacaaaaaaccgggtgacagcgtcgaacgtgatgaagtgctggtggaaattgaaacagacaaagtcgtgctggaagttccagccagcgattccggcgttctggaagcggtgctggaagaagaaggggcaaccgtcctctccagacaactgctcggacgcatccgtctgggcgacagcaccggtctgcctgcggaaataaaagaaaaagtacagtccacaccggcacagcgtcagaacgctggtctggatgaagaaaccaatgacgcggtaagccctgctgtgcgccgcctgctcgcagagcatggcctgaaagcggcagatattaccggcagtggtgtcggtggtcgtctgacccgtgaagatgttgagaaatatctgtcgcagcagccgaaagcacctgcaaaagccgccgctgagccggtttctcaggccggtttaccgcaccgcagtgaaaaacgcgtgccgatgacccgtctgcgcaagcgtgtggcagagcgtctgctggaagcgaaaaacaacaccgcaatgctgaccacctttaacgaggtaagcatgaagccggtgatggatatgcgcaaacagtacggcgaatcctttgaaaaacgccacggtgtgcgcctcggtttcatgtctttctatgtgaaagcggtggttgaggcactgaaacgttatccggaagtgaacgcctctatcgacggtactgatgtggtgtatcacaactattttgatatcagtattgcggtctccacgccgcgcggtctggtgaccccggtcctgcgtgatgcggatgcgctgagcatggctgaaatcgaaaaacgcattaaagagctggctgtcaaaggtcaggaaggcaaactgacagtggaagacctgaccggcggtaactttaccattaccaacggtggggtattcggctcactgatgtccacaccgatcattaacccgccgcagagtgcgattctggggatgcatgctatcaaagatcgtccgatggcggtaaatggtcaggtggtgatcctgccgatgatgtacctggcgctctcttatgaccaccgtctgattgatggacgtgaatctgtcggattcctcgtgaccattaaagagatgttagaagatccggcacgtttactgctcgacgtgtagtcaaccctcatccgggcggcatcgcgctaaaaccgcccggctgaactcgcgacagtgaatctgtgtccctgcgccgggaaaccggcgctatccaggcaacaacaataagagagtccgctctcatcagacaaattatggatagaacatcatgaatttacacgagtatcaggcaaaacaactcttcacccggtatggtttacctgcaccggcaggctatgcctgctccacaccccgtgaagcggaagaagctgcatccaaaatcggcagcggcccgtgggtcgtaaaatgccaggttcatgccgggggccgcgggaaagcgggcggtgtgaaactggttaagagcaaagacgaaattcgcgcgtttgccgaacagtggttaggcaagcgtctggtaacctatcagacagatgcactgggtcagcctgtgcatcaggtgctggtggaaggcgcaacagatatcgccaaagagctttatctgggtgccgtggtggatcgcggttcacgccgtgtggtctttatggcctccactgaaggtggtgtcgaaattgagaaagtggcacatgaaacaccggaactgatccacaaagccgtgattgacccgctgaccggcccgatgccgtatcaggggcgcgagctggcgtttaaactgggcttaaccggtaaattagtcagccagttcaccaaaatctttatgggactggcaaccatgttcctggagcgtgatctggccatggcggaaatcaacccgctggtgatcaccactcaggacgagcttatctgcctcgacggcaaattaggcattgacggtaacgctctgtaccgccagccggaactgcgtgaaatgcatgatccgtcacaggaagatgcccgcgaagcacaggctgcacagtgggaactgaactatgtggcactggacggcaatatcggctgtatggtgaacggtgccggtctggcaatgggcaccatggatatcgtcaaactgcacggcggtgagccggcaaacttcctggatgtcggcggcggcgcaaccaaagagcgtgtgacagaagcctttaaaatcattctgtctgacgaaaacgtcaaagcagtcttcgtcaatatcttcggcggaattgtccgttgtgacctgattgcggacgggatcatcggcgcggttgaggaagtcggtgtcagtgtgccggtggttgtgcgcctggaagggaacaacgcggaactgggtgcggaaaaactggcgaaaagtggtctgaatattattgcggcaaccagcctgacggatgctgcgaaacgtgttgttgcagcagtgggagcgaaataatgtctattttaatcgataagaacaccaaagttatctgtcagggattcacaggtagccaggggactttccactctgaacaggcaattgcgtacggcactaaaatggtcggcggtgtgacgccgggcaaaggcggtacaacacatttaggtttaccggtctttaacaccgtgcgtgacgcggtggaagccaccggtgcgaccgcttctgttatttatgttccggcaccgttctgcaaagactcgattctggaagcgattgatgcaggtattaagctgattatcaccatcacggaaggtatcccgactctggatatgctgaccgtcaaggtgaagctggatgaagctggtgtgcggatgatcggcccgaactgtccgggtgttatcactccgggtgagtgcaaaatcgggattatgccgggacatatccatctgccgggcaaagtggggatcgtttcccgttcaggtacgctgacttatgaagcggtgaaacagacgactgatgccggtctgggacaatccacctgtgtggggatcggcggtgacccgattccgggttctaactttattgatatcctgcggatgttccagaacgacccgcagacagaagcgattgttatgatcggtgaaatcggcggcagtgcggaagaagaagcggctgcctttatcaaagaccacgtcaccaaacctgttgtggcgtatatcgcgggtgtgaccgcgccgaaaggcaaacgtatgggtcatgcgggggcgattatcgcaggcgggaaggggacagcagatgagaaatttgccgcccttgaagccgccggtgtgaagacggtccgcagcctggctgatatcggtgatgcggtaaaagcgattctgaataaataattcctgccattattatacagccggagccggttccatgccgcttccggctgttttttgatctgaacacaattccgccatttctgcctgattacgcgcttttactcactgcttcctgttattgctgttgttttaagcaattttcttaattgttctgaaacgcctgctgtatcgtttacacagcaaaaagtctcaggtataaaagagcgttttttatcatcttgatttatacttaatttttgtgccgaaaatgattattgtcgtgcgttaatacaaacagacaataacagttttagtgataatttatttataattgaattatccggctcatgaaattaaccagaattactgatgaaaataaaaggttaataaaaagcgcatatattattggtatttttctgtcaggttgtatttgtgtgtacattaccgtaacaataaagtaactcaattaccatatatgcgattttaattaacacggagagggaaaattgacataaatcaatctattgcactggcattatttcggtggtttgtttaaattgtggcagatcaaaatagccgaaaatgactacgctgtgcattatttgatatatcctcagaattccaatctgaatcacgcaaaagcggtttattgtgtgcaaatataagcgtactattattagggtgtctatttaggtgtttttttgttactaatttgttattgcatttagaggcatttattgctggtagttatgttgctttctttcttcaggaaagcttgggttgccgcatgtcggtgtcttcctgctaggagcaaggagtcaagatgtttgatattgtcgaactgtcgcgattacagtttgccttaacagcgatgtaccacttcttatttgtaccgctaacattagggatgtccttcatgttagcgatcatggaaacggtatacgtcctgtccggtaaacaaatctataaagatatgacgaagttctggggcaagttatttggtattaacttcgctctgggtgttgctaccggtctgaccatggagttccagttcgggacaaactggtcatactactctcactatgtcggtgatatcttcggtgcgcctctggcaatcgaaggtctgatggcattcttcctcgaatccaccttcgtgggtctgttcttcttcggctgggatcgtctcagcaagaaacagcacctgatggtgacctggttcgttgcgctcggttccaacttctctgcgctgtggatcctggtggcaaacggctggatgcagaacccgattgctgctgacttcaactttgaaaccatgcgtatggagatgctgagcttctccgaactggttctcaacccggttgcacaggttaaatttgtgcacacagtggctgccggctactgtaccggtgcgatcttcgtactgtctatcagtgcgtggtatctgatgaagggccgtgatcttgcatttgcaaaacgctcttttgcgattgcagcaagctttggtatcgccgctgtgttatccgttatcgtgctgggtgatgaatccggttatgaaatgggtgacgtgcagaaaaccaaactcgccgcgattgaaggtgaatggcatactcagcctgcgcctgcatcatttaacgtgattgcgttccctaatcaggaaaaaatggaaaacagttttgcgattgagattccgtacctgatgggccttatcaccacccgttcaattgatactccggttctcggcctgcgtgacctgatggtgcagcacgaagcccgtatccgtaacggtatggtggcgtatgatctgttacagcagctgcgtggcggtaataccgacccggcagtccgtgatgcctttaatcagagcaaaaaagaccttggttacggcttactgctgaaacgctataccgataacgtcggtcaggcaactgaagagcagattcaggcagcaaccaaagactccattccgcgtgtcgcaccgctgttctgggcattccgcctgatggtggctgccggtggtctgatgctgatcgttctgggtctgtcattcctgagtgtactgcgcaatcgtatcggcaagtccaaatggctgctgcgtgctgcattcctcagcctgccgttaccgtggattggtgttgaagcaggctggttcgttgctgaatatggccgtcagccatgggcagtcggtgaagtgttaccgacagcatatgcaacgtcacatctggcagccggagacattctgttctctatggcgctgatttgcggcctgtataccttattcctgattgctgaaatgttcctgatgttcaaatttgcacgtcttggtccaagcagcttaaaaaccggccgttatcatttcgaaacgtccccggcacaagacgctaagtaaacaggagcccacttatgtttgattatgaaatattacggtttgtatggtggatcctgattggcgtactgctgattggcttcactgtaactgatggctttgatatgggcgtgggtgttctgctgcgagttatcggcagaaatgatactgaacgccgtatcatgattaacgcgattgcaccgcactgggacggtaaccaggtatggcttatcaccgcgggtggtgcactgttcgcagcatggccgatggtctatgctgcagcattctccggtttctatatcgcaatgattctggtcctggcggcattattcttccgtccggtcggttttgactatcgttcaaaactggaatcaccaaaatggcgcggtatgtgggactggggtatctttatcggcagtttcgtaccgtcattagtgatcggtgtggcattcggtaacctgttacagggtgtaccggttgaagttaactcccagctgcaggtgtcttatgcagggagcttcttcggtctgctgaacccgtacggtctgttagccggtttaatcagcctgatgatgatcgtggcgcacggtgcaacttacctgcagatgcgtaccaccggtgatctgcatgtgcgtgtgcgtaaagccaccactatcactgctctgctgacatttgttctgttcgcggcagccggtgcatggctgatgtggggcggtatcgatggtttccgtgttgtctctgacatcgaccatttcggtgcgtctaacccggtcaataaagaagtggtacaggaagcaggcgcatggatggcaaacttcaatgcctatccaatcctgtggatcctgcctgctattggtctggcatcacctctgctggtcgtgatgttcactgcaatggataaaggcgcgtgggcattcctgttcacctcgctgactattgccggtgtgatcctgacctgtggtacagcaatgttcccgttcattatgccttcaagcatcgacccgaacgttagtctgaccatgtgggatgcaacttccagcctgtttactctccaggtgatgacggttgttgcgattatctttgtaccacttgttctcctgtacaccatctggtgttacgtgaagatggcagggcgtattgataagtccttcatcgaagagaacaaacatacattgtactaaggagcagacgaatatgtggtattttgcatggatcctcggaacgctcctggcctgtagtattgctgttattgcagcactggctattgagcaccacgaagataaagccgcttcaggcgagtaagacggatgctggataagtcttaccaactactggataagggtcctttacgggcccttgtcctgataatggcgttggggctggcattgagtgtgatctgggatccgtcgcgttttgcggcaaacaccagttcattacagatctggcagggactgctgatgatctgggcggtatgcagcggcgcaattttcggtctggcattccggccgaagcgcgcaatctggaagattctgttccatccgcttccggcggtggtgattctgggttacggcctttatcattttttcagctgatataaacgtttatgactaaaaagccgttcatctgaacggctttttttcttttctgtttccgctccgattcacggatagcgcagtaatgcggcattatctgcaaaaaagcgggcaaaataatcaataaacacccggaccttctgcggcagatgtgccgcgggcggaaagaccatattgatgctctgatccggtaccggctgacgggtgaataccggaaccagtttttcctctgtcagttgctctctgatataccagaccggcagcagactgtaaccctgatgtgccagtgtcatggtgcggatcgcctgaatcgaattagagataaacacccggttgtccggcgcgggcagatgctgacgccagttgatacgggcggtcaggttgctgttggcgataaagggcagagcggcgggatcactgctttctgtcacgcggtgttgccggataaacgccggtgttgccacataacagaccggaaagtcagcgagtttgcggaaccgcagaccgctgtcactcagcgttcccagccggaacaccacatccagtttcagggcaatcaagtcactcagactgtgatcgacgcgataatctgctctgatcagcggatagcgctttgtgaaagcaggcaactgcggcagcagaaattgtccgccgaattctgcggcggcactgaaactcagcggtccctgtggttgtgctgtccccgttctgacggcatccatcgcgctgtcgaattgttgtaacagtggtttgaattgctgatacagcgcctgtcctgcttccgtcagcgtaaactgccgtgtggtccggtgcagcagtgtggtgctgagttcagactccagggctttgatatgcaggctgaccaccgatttgctcagattcaggcgtgcagcagcccgggtaaaggaaccggtatccacaacataaataaaggtattgatcttctcaacggctgtcagcataagattgtttcgttttttaaaacagtattgtctattttgatgcatagacggctgcggtcaactgcttttacactgccggccggaggaaaccatgacttatcgttaccgtatcgtcctgatttttttactgggcttttttattgattgtatcaatatctttatgtcggccatcacactgcctgctattgcagaggccatgcaggtgtcatccctgtcggtgacctgggtggcaaacagctatattctcggactgacactgattatcccgctcagcccccgtctggcggcccgtttcgggatccgcgaactgatgacggcctcaatgctgctgtttgccgcagcggcagtactggcaggcagtgcggaatcctttacttcactgattttctggcgttttttacagggtgtggcaggcggattactgatccctgccgggcagtcactgacttttcagtattttcaggggcgtgagcggagcaaaatctccaccattattatgatgatcgcgctgatagcacccgcgctttccccgatggccggggggagcattgttgacttcgccggatggcggcctgtcttttatgtcaatgcgccggtggcactctttacggcactgctggcctggtgctggatccgtgaaccgaaaaccactgccggagaagcaccggatctcaaagggctgcttctggtcagcctgacgctggcatccctgctgattgccctctcattgtacggggaataccacaatatcaccggcgcactggcgctgggcgggctgatgctgttcagtgccgggctttattaccgccattaccggcagactccgcaggcgattattgatttatcgctgctgaaaaatacacggctgtggctctcggttgcggtgtattacgcggtaccgggcgtattcaccggggcgaacatcctcgctatcttttatctgaccacggttctcggcctgagtactgccgtcaccggtgcgtttatgttgttgtatgcggcgggggcgatggtagctatgctgatcagcggcgcggtgtataaccggaccggtgccgggcgcctgtttattatcagtctgctgctgcacagcggtggtatcgcactgtttgccctgacagacagccacacaccgttatatttcatcggcctgatttatctgctgaccggcaccggcggcatcgccgcaaactgtgcacaaaccaccgcactgtatgattttcacgggacacagctgaacaaagccagcgtgatctggaatattaaccgccaggtggtgttcagcattggtactgccgtcatgatgacgctgtatcagaccctgaatgcggttgccccgggacaggcatttgccctgacatttctgggaggcgcactggccgggcttatcccgctgattttcctggtccgcccgcagttccgtacttcattaaaacccgcagaggagattattcgtgagtaataccatatttcagcaggcgtgtgacgaaatccatcatgtccatgacctgatttttaaaacatttactgtcccgggcgcagaagggcaggcggcactgtctgaattgctgacccatttcactcctgagttttccatgaccggtatcagcggggcagtgattgatctcgcggcggtgacggcgatgtttacccgtatacagggtcagagacagggagcaccgattgaaacggcggagtatcagtgcgtcagcctgacagaaaacaccatatccgtgcgctatcaggagacacagcactttgccggaagcaccacagcacggcgctcgctggtgattctccgccgggaggagaacgggaaatggcggtggcattatttacacgaaacaccgctgtctgcctgaaatagcgccggtggcgttttcagccggtaaatgcggacggaaatcctgtttttataagataaaaataaggtgatttaatttatgtaattacaataagttagattacgcggtaaataaatcggtagcacaaaaatccggataattccggatttttgcgtattcatggggaaaaatgtcttttaataagtgtttaatgatagctttcagagcaaaaaataacgcccctaaggtgttgtaatacgtaacaaaatattttttcatctcaacccttccgggggcttgcgtgttggataaaggcgagtatgattagcgcgcggacaaacgggcttttcttatctttacgaactaagcattttcaatacgtttgctcttcacgtatagtttgcaaagcatgttgtctgataaaggtaagttgcgggatattcaatgttcagttggccaatacgggtttattacgaagataccgatgctggtggtgtggtataccacgggcagtatcttgcatttttcgagcgcgccagaaccgaaatgttacgggaacggggctttcatcagcagcgtctgctggaagagcagctcggctttgtggtccgcaaattaactatcgattaccaccatccggcaaggttagacgatctgttagaggtacgcagtgagatcaccgacatccgtcgtgcgtctctgacatttacgcagacacttatgcataaaaacggaactcttttatgtcgcgcagaggtactggtcgcctgcgtgaatatttctttaatgaagccggtagcgcttcctgagtctattgtcgcggagtttaagcagtgactgacatgaatatctgggatttattcctgaaagcaagttacctcgtgcaatttatcatgctggtattgctgggcttttctgttgcctcgtgggccattattattcagcgcaccaaagtcctgaatgcggccacccgtgaagcagaagcgtttgaagacaaattctggtcaggaatcgaactgtcccgtctgtataaagaaagccaggcccgccgtgatgaactgagcggtactgagcagatcttctactccggctttaaagaatttgcccgcctgcatcaggcgaatgtgcactctccgcaggcggtggaaaccggtgcggcgcgtgcaatgcgcatctccatgaaccgtgagatggaaaatctggaaaaccacatcccgttccttggtactgtcggttctatcagcccgtatatcggtctgttcggtacagtatgggggatcatgcacgcctttatcgcactgggtgcggtaaaacaggcaacattacagatggtggcaccgggtattgcggaagcactgattgcaacagcaatcggtctgtttgcggcaattcctgcggttatggcatacaaccgtcttaatcagcgcgtgaataaattagaacagaattacgacaacttcagcgaagaatttctggcgattttacaccgtcaggcctttgctactgctgataagaaataaggcaggagattatcatggcacgtcatcgcggacgccggcgggagctgaaatccgaaattaacattgttcctttactggacgtgttactcgtgttgctgctgatcttcatggcaacagcgccgatcatcagtcagagtgtggaagtggatctgccggatgcctccgattcacaatccgtttccaccaatgataatccgccggtgattctggaagtctccggtgtcggccgctacaccctggtcgtgaagcaggatcgtctggaactgttaccggaagagcagatcattgctgcggcaaaacagtatctggctgaagatccgaagactattttcctggtcggcggtgccaaagatgtgccttacgaagagattattaatggcctgaatattctgaaacaggccggagtgaaatctgtgggcctgatgacgaagccgatgtaaggtttgttatgcagatgttttcactcagaaggttagggaattaagcgtgggaaagctgaaagagcgtaaagataaattaaatcgttctgtcatcacctctgtggtgttgcatcttttgctgattgcgcttgtgatctggggatcctttgtaaccaaatcagggctgaccggcggcggtgagggcggtcaggtgatcgacgccattatggttgatccgaacgccatggttgaaaattttaaccagcagcaacagcagcaggccaacgcaaaacaggctcaggcgcagcgcgagaaaaaggcgaagcagcaggaagaagaattacgtcagaaagaactgcgtgagcaggagcgcttaaaagcaattgaagaagagcgcctgaagaccgaacaacaagttgaagaccagaaaaaacaggctgaagagcagcaaaaacaagctcaggaagccgtgaagaaagccaaagaagagcaaaagctggcggaagaagccgctgccaaagctcaggctgaaaaagaaaaagtgattaaagagcaggcactggcgaagaaacaggctgacgaaaaagctgccgcacagaaagccgctgaagaagaaaaagccaaagccgaaaaagcggctcaggaaaaagcagccaaggccgaagccgctaaagcggaagctgccaaagcagaagccgcaaaagctgaaaaagccgccaaagacaaagcagctaaagagaaagccgccaaagccgcagcgaaaaaacaggccagtgaagtcgatgacctcctcggcggactggcgtccaacgctccgggtacagaaagcggcggtgcatccgcagccggtcagggcggtggtaagaagagcggaacaaactcggatggcgatatgaacggttatatcgcacaggtccggttagcgattcaggcgaagttctataatgcggatatgtaccgcggtaaaacctgtacgctggaaattaatatcactgataaaggtacgcttatcagtgtgaatgcggtcggtggtgatgacggtttatgtcaggccgcactcgcggcggccaaacaggctcgtattcctgcgccgccgagcaaatcggtctggcagcagtttaagaataccaaactggactttaagccggaataagctgtaatacagcgtgacgaaccagatatatccgggtattagtttttactgtggtatctggttttggttatgaacgtttgttaaaatacgggtttgatgcgggcattggcgcaacgagggagagagaatgaagcaggcagttaaatacatgctcggttttctgatgctgtgggcggcagttgctcaggctgaagttcgtatcgagattactcagggtgttgattcagcacgtcctatcggcattgtacctttccaggtcgccggcggcggcgctgtaccggaagaagtcggcgctatcattgctgctgacctgcgtaacagcgggaaatttaacccgatcgaccctaaccgtatgccgcagttaccgggtaccgcgtctgaagtggttcctgagtcctggacggcgttaggcattgatgctgttgttgtcggccaggttcagccgggtgctgacggcaactatctggtgagctaccaactggtggatacctccggttccccgggcagcgtgcttgcacagaaccagtttaaagtcaccaaacagtggctgcgttatgcggcacacactgccagtgatgaagtatttgagaaattaaccggtattcgtggtgcattccgtactcggatcgcttatgtggtggttaaaaacagcggtgactatcgtcacgagctgcgcgtgtctgattatgacggctacaaccagttcaccgttcaccgttcacctgagccgctgatgtcaccggcatggtcaccggatggcgagaaactggcgtatgttacctttgagagcggaagttcagccctggttattcagaatctgtccagcggacaggtgcgtcaggttgcttcattcccgcgtcacaacggtgcaccggcattttcaccggacggaaccaaactggcatttgcgttatcaaaaaccggtagtctgaatctgtatgtgatggatctcggctcaggccagatgcgtcaggtaacagatggtcgcagtaataacaccgaaccttcatggttcccggacagccagacgttagcgttcacgtctgaccaggctggtcgtccgcagatctataaggttggtattaatggcggtgcgcctgagcgcctgacgtgggatgggactcagaaccagaatggtgacgtcagtgctgacggcagtttcctggtaatggtcagttcaggcggcgggaaacagcatatcgccaaacaagatctagtagcgaacaatttccagattttaacggatacgttcctagatgaaacgccaagtatcgcacctaacggcactatggttatttatagctcctcacaaggtatgggaactatattgcagctggtttcgaccgacgggcgtttcaaagcgcgtcttccggcgactgacggacaggtaaaattccctgcctggtcgccgtatctgtgatgcattaaaaatatgtatggcaaattataaaaggatcaaagagatgcaacttaacaaagtgcttaaagggctgatgttagctttacctgttctggctgttgctgcatgtagttctaacaaaaacgaccaggcggatgcgggcactgtcgacaatggcgcaaacactggtatgtctgcggaagaactggcacgccagcagctgcaggaacttcagaacaacaatatcgtatacttcggtttcgacaaatacgatatctctcctgaattccagcaaatgctggatgcacacgctgcattcctgcgcaacaacccttcttacaaagtaactgtagaaggtcatgctgacgaacgtggtactcctgagtacaacatcgcactgggcgagcgtcgtgctaacgcagcgaaaatgtacctgcagggtaaaggcgttaacggcgaacaaatctctatcgtttcttacggtaaagagaagccggcagttctgggtcacaccgaagctgactatgctaaaaaccgtcgtgctgtaatcgtatactaagagatatacatgaaaagtaacttcagacgcctgatggtgagtctgtcgttattgataggtgtagcggccccctgggccgctattgctcaggcacccatcatcaatatcggctcaggctccactgatgaccgcctcacgcagctcgagcgtatttctaacgctcatggtcagctattaacccaacttcagcaacaagtcatggacaaccagcgcgatatcgacatgctgcgcgggcaaatccaggaaagtcagtaccagctgaatcagttgacagaacgccaacgcgaacttttctcacaggtggattccctcaccggtggcggcagtgcatcaacagataatacatccgcggcatccggtaatacggactctgcgggtactgccgcaacctcagctcctgctgctgcaagtaagggcaatgagaaagatgactataacgccgcggtaaacatggcgatgaacaccaaagattatgatggtgcaatcagcgcatttcagagttttatccaaagctatccgaaatccggttatcttcctaatgccaattactggttagggcagatgaactacaacaaaggcaaaaaagatgacgccgcggcgtattttgcttctgtggtaaagaactggccgaaatcccagaaagcaggggagtccttctataaagtcgggctgatcatgcaggagaaaggggataaagcgaaagcgaaagcgatttatcagcaggttgtcgcaaaatatccgggctcttccggtgcgaaactggctgagaaaaaactggctggtttataaccgccggtttatttttttgctcagagtatagccccgaccggagagttttttgctcaaccggggctaagtgagtgaattataagcgtttgaataagttaatttgaaaaaatcgttgcaccggccggataaatcagtattatatcgtgccgttggcaagagagtacgggtcgttagctcagttggtagagcagttgacttttaatcaattggtcacaggttcgaatcctgtacgacccaccattctcttttgcccgaaatctgaaacgggtcgttagctcagttggtagagcagttgacttttaatcaattggtcacaggttcgaatcctgtacgacccaccatttcagagtccctcagcagtattacgatgggtcgttagctcagttggtagagcagttgacttttaatcaattggtcacaggttcgaatcctgtacgacccaccatcgtaaccattttccctctgatttttgttctcccccggcatcacaccggcgatcatccgtttgttattattcattctccggcgcaagtaaatcatcggcattcagccggtcagtgaccagtgcaataattttatctgccagcgttatatcgatatcaaatttctgtgtttcaatcacgcggagtgccacatcgcggtagagtgtcagcatcgccatatgcgcccgtgcggcacggacacgatcacggttatccagtgtcgccataaaacgcccgtacaggcccggaggcagccaggtgcccagatgacgccccgcataccagacatcctgtgtaccgtcactacgaagcagcacatgccactccagcagggtgatcagccactgtttcatcgccacatcccgcagacgggcagtccagagttcattgcgcagataataaaccggcacctgtgaggcttccagccagaagttctgccagttttccaggaatgtctgctgatccggcggagtgagcacggcagccggatcggcatactcaggcaacccggcagtgagaccggttttatccagcagaacggcataaccgcgctgatagatgctgtccagcccgtgtgcggccatttgtatgatacgttcgcgcccggccagcacaaaatcaactttacggcctttctcatacagaacctgacaagacggccagcagaggctgtcgtcttcgcgcgaagccgctttgcggataatcagcggcacaccaaaccggctcagccagcggctgtcctgaaacaactcatcatgactgctgccgatcagttcggcattaatatccgaaaaacggtctgcctggttctggcgtgccacagagccggtgataatgaccgcatcgatacggggatctaatagggcaaaagaaattatattgtttataatttgctcaattgattccatcttacatctcattcatataattgatagctgggctgatagtacgtcataaacaaaaatagcgggagagttcaggttaaaaaaacgttatcatgtttagcatattaaacaaatgctgttacgatgggatgattttactgaaaacagcagggaaggatacagttaactaaacctgttatcagtggctgaccgccggtgacaggaaatatacttaacacaggtgacggaatggaattttttgatattaataatattctcgtggtgatcccttactggaaagaagggtcttatgctttgtcctggattgaagcggtgggagcaaccgccgggttgttatgtatctggctggcaagcctggaaaaaacaatcaattatctgtttggtctgattaacgtcacactgtttgcggtgattttctttcagatccagctctacgccaatctgctgctgcagattttctttttcgccgccaatatttacggctggtatgcctggagccggcaaaatgagaaagcagaagcggagctgaaaatccgctggatgccactgcggcagactgccgtgattgcggcggtttctctggcggcgattttactgctggcgcgttttatcgacccggtctttacgtggctggcacagagcatggtcagtatactgaatgccgcaggggctgatctggcaatgccggtattgctgcccgatgctttcccgttctgggatgcagccatgacggtattgtctgtggtggcgatgatcctgatgacccgcaaactggtggaaaactggctgctgtgggtggttatcaatatgatcagtattgtgatttatgcccttcagggtgtgtacgcgctgtcgctggaatatatcatcctgctgggtgtggcgctcaacggctcgcggatgtggataaaagcagcgaagcagccgtaaaactgttttcagtgcaataaccgggtgattataatgagagtccggtaataatcggattctcattaatcagcaataaaaggaaacgcctgtggccggtggcagcttactcgcactactcgatgatatcgcaactgtactggatgatgtctctgtgatgaccaaaatggccgccaaaaagacatccggggtactgggggatgacctggcgctgaatgctcagcaggtggccggtgtccgcgctgagcgggagatcccggtggtctgggcggtggcgaaaggttcctttctcaataaactgattctggtaccgctcgcactgttgatcaacgcctttgccccctgggctgttacgccgcttctgatggtcggcggggcgtttttgtgttttgagggggcggaaaaactggcacataagtttctgcataaagccggtgatgagcccggtgaaacggcaccggcggaagatattcagacgccggaagagttggccgcgttcgagaaacgcaaagtcaaaggcgctatccgcaccgattttgtgttatcagcggagattattgctatcaccctcggtattgttgccacctctccctttattaatcagctcgtggtgttgtcggtgattgcgatcattatgactatcggggtatacggcctggtggccgggattgtcaaactcgatgatctgggattttacctgcagaagaaatcagccgcgctgctgaaaaaactgggtgacggactgatccacgccacgccgtatttaatgaaaaccttatcagtcgtcgggacagcggccatgtttatggtcggcggcggtattctgacacacggcattccgtttattcataacctgattgaaagtcttgctcagcagagtgcacaactcccggcactcggcagcatattgcactttatgaccccaccggttgccaatttattgtttggtctcgtcgccggtctggtgattgttgcgctgattaccgctgttaagcgtattaaaacgggattagcggcataaatacccttctcacgggcagcggctgatgaagccgctgttttccttctgattcataataatttgtcctgttgatctgaatattttcggggtgaaaaattaatttcaattccggcggcagctaattgtttacagcttgttgacaagcagttagattaaaataacgacaataatgaaacgggacaccggaagagacgggttatgaattatcagaacgatgatgtaaaaataaaagaaattcgggaattattaccgccagtggcgttattagagtcatttcccgcgactgagactgccgcagacaccgttcgccgcacccgtcatgcaatccacgaaatcctggaaggccgggatgatcgcctgctggtcgttatcgggccatgctcaattcacgacccgaaagcggcggttgaatatgcggatcgcctgctgacattacgcaaagaactgaaaggtgagctggaaatcgtcatgcgcgtctattttgaaaaaccgcgcaccacggtcggctggaaagggctgatcaacgatccgcacctcgaccactcttttgccatcaatgatggtctgcgtattgcccgcaaactgctgctggatatcaatgataaaggcttaccggcagccggtgagtttctggatatgatcaccccgcagtatctggcggatctgatgagctggggtgctatcggtgcccgtaccacggaatctcaggtacaccgtgagctggcctccgggttgtcctgcccggtcgggtttaaaaacggtacagacggtaccatcaaagtcgccattgatgccattaacgccgccgggtcgccgcactgttttctgtccgtgaccaagtggggacattcggccatcgtgaacaccaccggtaacggtgactgccatatcattctgcgtggcggtaaaaaacctaactacagcgcggaagatgtcagtgcggtaaaagaagggctggcacaggccggtctggcaccgcgtatcatgatcgatttcagccacgctaacagcagcaaacagtacaagcgtcagatggatgtgagcaccgatgtggcacagcaggttgccggtggtgagaaagccattatgggtgtgatggtggaaagccaccttgaggaagggaaccagaacctggaaggtgatgcgccgctcgtgtacggcaagagcgtgacagatgcctgcatcggctgggaagataccgaaaccctgctgcgtcagctggcagatgcggtaaaagcccgccgcagctgatttcgccggaagcattaatcccggaaaataaaaaaccctgacactgtcagggtttttttcaccaaagaaagcggattacttcgctttaccctggttagcaacagcagcggctttggcagcaatcgcatcctggtcgcccaggtaatagcggcgcagcggcttcatgttttcatcaaactcatacaccagcggcactgcggtcgggatgttcagctcgaggatttcatcttcgctcatgttatccaggtatttcaccagtgcacgcagggagttaccgtgtgcagcgatgatcactttctcaccggaagcaacgcgtggtttgataacatcagtccagtaaggcacaacgcggtcgatagtgatcgccaggctctcagtggcaggtaattcgctttctgccagtttcgcataacgcggatcgtggcccgggaagcgctcatcacttttttccagtgccggcggggtgatggcaaagccgcgacgccacagtttgacctgctcgtcaccgtattttgcagcggtttccgctttatccagaccctggagtgcgccgtaatgacgttcgttcagtttccagcttttctcaaccggcagccactgctggtttacctgatccaggatattccacagtgtgtgaatagcgcgtttcagtacagaggtataggcgaaatcaaaagagaagccttcttttttgagtaactgaccagcctcttgtgcttcagcacggcctttttcagataactcaacatcagtccagccggtaaagcggttctctttgttccactcactttcaccgtgacgtacaagcaccagtttagttactgccatagcgtaaactcctgttgtgtttcagatagggggtttcagaattgaaacagacccggcacattgcccattatattggtcaccggcgcctttcggcaaactttccgcacaggtatttccgccggggcctgtgcggaagagatcaattccgtcctgtttaccggatagtgtacaccaaaactgaatcgattccgctataaatgtttacgcaaagtgtgatacacaggcaaaaacggtttttttacgccaccttaaacggccaggtaaaaaacagcagatggcagaggttcagcgcgaagtgaaaccctgtcgccacccacagccgcccgctccacatccaggccagcccgtagataacccctgccagaccggcaaagacaaccagcagcggccctccggcaatatgtgccaggccgaagactgcggcagcaataaacaacgcggcatacggcggcagataccgggaaagtacctgctgaatagccccccggaacagcgcttcctctgcgagggagacaaaaaacagattagccagcataaacgccggcagccagcgcggcagatgcggttcaaaccccagtccgccaagggcggttgccagtaacaacagtgcaggcacggagaaagccagtaacagccagtgcagacgggtggcacggcgcagcggcgctgtgacaaacagttgcggaatgatgatgatcagcataaacggaagcagtgctttatcggcattaaaccagaatgaatagggcggactgtgcggcccggcagcctccgggggcatccagcgcaggttgtggaatcccggcagcagatgaaaagccagccccgtcacgacggtgatgaccagtagtgtcagcagtacacgctgccatgaacgtggtgcggtataaggccgtgcaacagccagcaggatagcaagccacagggtgagcagggcatgccagtccatcacaccggtaaacagggcgctgatggtggcagccagaagtgttgccagtgacagtgtccggtgaaattgtaataacagcagagataatgcaagtaaaagccaggtcatggaattgtgtcagagaatcagaaaaggagtgggcagggtaaaagagaagtcagtgatgcgccagtaaaaaaagcagactgataatgatttttaatcagattattcttaataacagactgaatacattcagaaaataacggctgtttccggtgcagtaaaaaagtaaaacagccgtttgataaaaagattacaacgtattgatttcgtaacgataactaccgttatcaggaataaatgccagccgccggttgatacaggccggggtatcctctctgtgatggctgacaaacagcagctgggtatcaccacggcttatcataatatcgataaaacgcagcaccagcaggcggttgagtgtatccagcccctgtaacggctcatcaaggatcagcattgcagggtgttttaccagggccctggcaatcagtatcagccgctgctgcccccacgacaggctgtggaacggagcatcgcggtacgctttcagaccgagcagcgccagccactcatccgccagttttacctgccggtctgacggtttctgatagagcccgacagaatcgaaataaccggaaatcagcgtgttacgcacactgatattgacgcggtaactgaggtggatgctgttactgacatacccgatatggcgtttgatatcccacaccgtttctccgctgccccggcggcggccgaacagcgtcaggtcattgctgtagccctgcggatgatcaccggtgatcagactgagcagtgtggatttacccgcgccgttctcgccggtgatttgccagtgctcaccgggcagcacctgccaggtcagatcattgaggatgggcttatcattatagctgacacagccgtgattgaggatcacccgcggaatatccggcgcaaggcgttctgcggacgggtcatcccgctccggcagcgtcagatgctctgtctgctcactacgggccagctgtgcctgtaatagtgcggataaggtatccgccggtgccagcacacagtctgtcagcagcccggcgcgggtgataaagtccggaatatcactgaaacggttgaggatcagaacaaccgtcagcccgccctctgcaagctctgccagcatctcactgagcatacggcgggaatcggtatccagcccgtcataaggctcatccagcaccagtaaatccggctctgtcatcagtgcctgacacagcagggttttgcgggtttcaccggtggaaaggtatttaaagcggcgtgacaggcgatcagaaatcccgaactgcgccgccagctgcaggcagcgctcattatcacgatgctccgcctgaataatctcagcggtggtacggccgttatcggtgtcatcgccatccatcaggtcggtattattgcggttccactcttcatcaatcagcgcctgtaatttctcaaacgcgaccagaaccggacggcggaaagtgttgctcatctccccggaaagcagcggaagttcctgaatcagcgcgcgggcaagggcagattttccactgccgttagtgccgataaaggcgtggtgctgaccgctttccagctgtaatgacggaacagaaagctgtttatccgcgcttaaccggaagaccccttgtgtgatgtgcagatatgccatagtgaacagccttattattagtttaattattcaccagaaataagcggaaccggcagggatgtcaagatatggtaccggtgttacatcccgtatcatgaaaagaagatctgcttcacagaaacgtcatcattcagtctgctgtttttgttatactttttggtacagaaatcagggcatcacggaaattaaccggaagagagggcagggtgagaacaggattaaaatattcggtgctggcattactggtcagcggaacggtcaatgccgcgacagtggatctgcgggtgatggaaacctcggatattcacagtaacttaattgactttgattatttcaaagacaaaccgacagagcagtttggtctggtccgcaccgccggtttaattaaagcggcaaaaggtgaagccaccaacgcagtattagtggataacggggacttaattcagggcagcccgctggcggattatatggtcagtaaagggttaaatgacggtgaagcccatccggcacataagctgatgaataccatgggttataccgtcggaaacttcggtaaccatgaatttaactttggcctggattatctgaaaaaagccattgccggtgcggattttccgtatgtgaatgccaatattattgatgagaaaaccggtaagaatctgtttaccccttatattatcgttgataccccggttaaagatcgcgacggcaaagagcatgtgattaaaatcggctatatcggttttgtaccgccgcagatccttatctgggataaagcgaatctggaaggaaaagtccgcgtcaatgatattacggaaaccgcgaaaaaatttgtgccgcaaatgaaggcagaaggtgcggatttaattgtcgctattccgcactccggtttttctcaggagccgtataaagccatggctgagaactcggtttattatctcagtgaagtaccgggtattaatgccattatgttcggtcactcgcacggtgtatttccgggcaaagactttgcggatatcaaaggcgttaatattgagcagggaaccgttaacggtattccggcagtgatgcccggccagtggggggatcacctcggcgtggtggatctggtgctgaataatgatgacggtgcgtggaaggtggcggatgccaaagcacaggcgcgtccgatttatgacaaagtcaataaaaagccgctggtggtacgggatgacaagctggcttctgtgattgatgagcagcacaatgcgacccggacctttgtcggcaaactgattggtaaatcaccggataatatgtacagctaccttgccttgctgcagagcgacccgacggtgcagattgtgaataatgcacagactgattatacccgccgctttattcagggcgatccggatctggcagatttaccggtgctgtcagcggctgcaccgtttaaagtgggcggacgcaaaaatgccccggcggatttcgtcgaggtggaaaaaggggatatgacgttccgcaacgcggcggatctctatctctacccgaatacgctggtggtggtgaaagcgaccggtgcggaagtgaccgaatggctggagtgctccgccgggatgttcaatcagattaacccgcagtcagaggcaccgcagagcctggtcaactgggatggtttcagaacctataatttcgataccatttccgggatcaactatcagatagacctgacacaaccggcaaaatatgatgtggagtgccagacagtcaatccgcaggccaaccgtatcaaaaatgtgacttatcagggtaagccgattgatccgaaagcggttttcctggttgccaccaataactaccgtgcttacggcggaaaatttgccggtaccggtgacaaacatattgcgtttgcctcaccggatgaaaaccgcagtgtgctggccggttatatcgcggcagaaaccaaagcgaaaggtgcggtatcagcgcaggctgagcaaaactggacatttgtgccggtgaaaacggataagaaattagatatccgctttgaaacttcaccgggcgataaagccacacagtttattaaagaaaatgcccattacccgatgacccgggtcgggacggatgatgtgggttttgcggtttatcaggttgatttaacagcgaagtaagcagttactcacgaaagccgccgtcagcggcggcttttatcatcatttttatcagcataatgtggcaataatcacctggtccgcattaaacagcgcggtgacgtcatcaccttctttcagttgctgcctgtcggcatcctgattatccagggtggagcataattgtgcgccgccggtcagtgtcaccatcacctcgctgttttccgcacctctggcaacggaacagatacgtccgctcagacggttgtcataatccgtgctgttttctgcggatttgctgattttcacccacggcgctttaatcagagtaagtacttctttaccgactgataagcccagccggttggcactctgttccgtcagggcaacggcaagttcggtctttttatccgccagcaggacattcacatgctgctgcacatgagaatggttgcgcgacataattgtgccgaagaactggttacgggcactggtctgcaatgagaagcgggagatggccgccagcaggctgtcgaggggcagcgaatcatccttaagaacatcaaaggctttctgctggatctgtgccagcagatcataaagctgaagtaagcgctcaccatagcgtgtcagtgtcgcgccgccgccgcctttgccgccggtggcccggtcaacaatggtttcctcggcaagctggttcatctcattgatggcatcccaggcgcttttgtaactgattccggccagttttgccccctgactgatggagccggtggctctgacctgtttgagtaaggaaatccgccgcggatcggcaaataaatgaccttctgatttcagtgttaataaaatatccaacggaaaataccccgtatattaatcagacagaatcaccggcgcagtctctccgcccggtgcggctttactttccggttagtgtagcaaactgcgtttttttttcatctgccaatatggcggtttaagtttacttaaaaattcatgaaccggataaaaacaggtatggtataggaattgattatcagccagagattatttcatgcagaatgtattatttcgtcttcatcaggcagtcaaggattccccggaaccggaaggggctgaaacagaagaatttgcccgtatgctggcagaacagccattctgggctgaatcacaggatcatgaaagtggcggacaaattggtctggcattcactcagggggaagatgatgaagaacctctgctgctcgtttatatgcgtgatgatggcggtcatgaagcacctgcaaaagtcgcggaagaaatggcatccggtgagcgggaatatacctggctgccgggcgcgtttttactgggactgagcaggaaaattgatttcacactgtgcatcatcggtgaggatgggcaaaccctgccactgaacagccagtttatgaaaatgatgtttctctatattcaggagctttaccgcgaagacgataaaggtgaaacaccggtacaatccccggctgcccctgtctcaccacgcagcagtattgtggaaaaacccggcagtgccggaaaagtgataggttttctgattctggcggcggctattgtggcggttgtttactttatgcagacctgacagcacgaatcgccatgctttccggggtgtgatttatatagaatagcggccattatgacgctattatagtcatgctgaatatccttttcgcctgatataaagagattaagtgctatgtttgagttagttaaaagtttaggtttcgcactgttaatggttcctgttgttatgacaggcctggcggctctgatctggggattaggtgaaattttcaacctgatttcaaaaggcgagcgccgcgaaaagcagctctgattataccgtattcaggattacctgcgttcgcgggtaatccgtctttgtttctgttttcccgctcattatctgcgtaattcccctcattttatattgttttccgcttaactgccgatagtgggataaacctcctttcatttttcgttgtatcttgttatatacaacgggttaatcctaatctatcctggtggaaaaaatgaaaaaacagttcagtaagttattggccggtgttgttatctctgctgctgtcatgagtcaggcatgggccgctgaaaaagtgaccgtatttgctgcggcatcactgacaaatgcggttgatgaaatctcggcaaaatataagcaggagaaaaaaggtgaagtggtcgcgtcttatgcgtcttcttccaccctggcccgtcagattgaaaatggtgctccggcagatatctttatttctgctgaccagaaatggatggattatgcccaggagaaaaacctgatcatcaatgacacccgtaaaaccctgctgggtaatgagctggtgctgattgccgcgaaagacagcaaaattgataaagttgatattaataagcagactgactgggttaaattactggatggcggccgtctggctgtcggcgatcctgatcatgtgccggttggtatctatgcacaggaagccctggaaaacctgggtgcctggaaagtcgttgatccgatgctggcccgcaccaataatgtgcgcagcggcatggcgctggtggaacgcggtgaagcgccgctgggtattgtgtacggctctgatgcggttgccagtgataaagtgaaagtggtcggtattttccctgcagatacccataaaccggttgaatatccgattgctatcctgaaagatcgcaataatgccgatgttaaaggtttctatgattacctgcagacaccggaagcaaaagagatcttcaaacgttacggtttcagccctctgtaataagtaaggactaacagacagcgatgttgaatgagtatgaatggcaggcggtcatcctcagcctgaaagtatcaacggtcgccgtggcagccagtctgccgtttggcatactgatggcatgggtactggtgcgctgccgttttccgggcaagtcgctgctggacagtcttatccacttaccactggtgttaccgccggtggtagtgggttatctgctgctgatcagcatggggcgcaaaggcattatcggtgagtggctctataactggttcggtttcagttttaccttcagctggcgcggtgccgcgctggctgcggctgtggtggcttttccgctgatggtgagggctatccgcctggcgctggaagcggtggatatgcgcctggagcaggcggcacggacactcggggcttccccgttgcgggtctttttcaccatcacactgccgctgtcgctgccggggattattgtcggtaccgtgctggcatttgcccgttcgctgggggaattcggtgcgacaatcacctttgtttccaatatcccgggggaaacccggactatcccgctggccatgtactccctgcttgaaacgccgggggcggaaatggacgcagcgcggctctgtattatcgccattgttctggcactggcttcactgctggcctcggaatggctgacccgctggggacgcaaacgcctgggggttgccacatgttagtgcttgattttgaacaacagctcggtgatttatcgatggtgatcaataccgaactggccagtgaccgtattaccgctgtcttcgggctctccggggcagggaaaacctcctttatcaatgtgatcggcgggctgacaaaaccgcagaaagggcggattgagcttaacggccacacactcgtcaatattgaaaaacgtatctgtctgccgccggaaaaacgcaaaatcggctatgtcttccaggatgcacgcctgtttccccattaccggataagaggcaacctgcgctacggcatggcacgggggatggaagatcagtttgacagtattgtggaactgctgggtatcgggcatctgctgaaccgcctgccgatgaccctctccggcggggagaaacagcgggtggcgattggccgcgcgctgctgaccgcaccggatatcctgctgatggatgaaccgctggcgtctctggatctgccgcgtaaacgcgaactgctgccgtatctggaaaagatggcacaggatatcagtattccgatcctgtatgtcagccacagcctggatgagatcctgcggctggcggaagatgtggtgatcctggaaaaaggccgcattctggcacagggaccgctggaagaggtatgggcaggggcggcattacgcccgtggctgacacaggaaagtctctcaagtgtactgagtgtcactgtgcttgagcaccacgaccgctacgccatgacggccgctgctatcggtgaccaggtgctgtgggtgccgcgtatcgccggtgaacgggacacgccggtacgtgtgcgtgtcagtgcggatgatgtgtccattgcactggaaaaaccgaaaagcagcagtatccgcaatatattacgggcaaaaatcacggaaatgtatgatgacgacaacgggcagactgatgtgcgtctggcagtcggcaatcatttcctctgggcacgtattaccggctgggcgcgggatgatttgcagctgaaacccggacaatgggtgtatgcccaggtaaaaagcgtgtcactgagccgcgaattataatttatctgaatatacgtacttttcattaataaaaggggcattcatattattccgattgcccttccgaatcaccggcgatatatattaacgccggtgcatcactgaccctgccagattatcacagaatattctctgcacacggaaacaagtgtaagacgtgcgttattgcataagaaaccactgagtcagagggataaaatgaaaaaagcacttttctttttattactgggtattttctccggcggccaggcgctggcggcaaatcaggtgatgtgttacacctatctgaaaaaagtcaaagatgttgaaatcgaaaacttaaaagtctggtgtatcggcaccactgacggctcccagggcggaatgcgtatccctgatctgctcagtatgggatataaagtggtggcaacagaaagcttcccgtatcagtattctgagggcggctatacttatgatggatcgaaattactgctgatcgtcgaaaatgcaaaattcccgaatcagaacccggcagaaaaaccaaaaaataactggagttttgataagtataagtaacaggttttattctctggccagcgggaaataaataaaaacgcctttattaaaaggcgtttttttatggtctattacactgtatttatcagctgagaatatgacggcggattgcctgcgcaatacccggctgggtattatccgggataatcaggtcagcgtgtgctttgacttcgtctgccgcattacccattgccacacccaggccggcggctgaaagcatactgatgtcattatggttatcaccaaatgccatcacatctttcattgtcattccctgagattccacccattcctgtaaacggcggcctttgctgttacctttgcgggcaatatccacctggtttatccacgaccactcgcaggacagtcccatatccgcttccacagcgtcggtaaattcacgcagtttgttcagatcatctgagcaggtggcgaatttccagatagtgtcagcgcgatcaacctcatcaagaaaattattcactttgcgcatcaccggacgctggtgctccggcagagaagctgaccagttcagtgtccgctcaatagtgctgctgtcagtgtgataaagcatggcatccgagatatacatcagatgctcgatatccgtctgtgccaggcgttcgagcagctgacgggattcactgacactcatcggatcggcggaaagcacttttttccccggataatcgtacagataggtaccgttacagcagatagccggtgtatccagctgcaatgtctgataaaacggatgaatagcaacgtgatgacggccggtgacaatcagcacctgcaccccggcacgacgggcttcgcggatggcatccagcgactcctgcaatatatgtttatccggatcgagaagtgtaccatcgagatcaaatgcgaggacgcggtaagacataacagggagccccttgtatgagtgtcagaaccggaataacggcgggcatcagggaatattattgtatcctgacggcatcctgaatgattccgggcggagataactgataatatagcatgttaattgtttcgcgataaacgctaagtgcggtattattatacagaaatgcttacattacctgttaaaaatcaaacgggtaagtgatgatattaaggagcgcgaatgaagcaggtggtttatgttgccagtacggaaagtcatcagattcatgtctggcagatgaatgaacacggtgagatgtcactgttacagacagtatcaacgcctgatcaggtgcagccgctgatcaccgcgccggatggccgtcatctttatgctgcggtcaaaccgggcaatgcggtggcgacttataaaatcgcggaagacggcaaactcacacaaaccggcctgacgccgctcccgggcactgccgcctatatcacccttgataaagcggggcgcacactgtatgccgcctcttatcatcagggaaatctggcggtactgccgatccgcgataacggtattcccgcccgtgcagtgcaggtgatcgagggattaaaaaatccgcattccgccaatattgcgcaggatggacacacactgtttgtgccgtgcctcggggaagatcatatccgcgtttacactattgatgaagacggacgcttaactgaacgtcacgccgatatgctgacggttgctgccggtgccgggccgcgccatatggcgtttcatccggcaaaacatgtggcgtattgcctgaatgaattaaatgcgaccattaatgtttaccgcgaatgggtgaaagtccgtgaaattcagtctgtcgatatgatggcggatggttattcaggacgccgctgggctgccgatattcatatcacgccggacgggcatcatctctatgcctgtgagcgggcatcaagcgtgattaatcactaccgggtgtcggatgacggcggtcatctgcagctggcggggcgttatccgacagaaactcagccgcgcggttttgcggtggataacagcgggcgtttcctgatctcagccggacagctttctcaccatgtggcggtttcccggattgatgcgattaccggcgaattgcacctgataaaccgctatccggcagggaaagggccgatgtgggtgacagtgctgacgctgaaataacagtgctgacgctgaaataacagtgctcaggtagttttctgttactccggagcccggcgggtaacgggcaaaaacgaaaagtcgctgtaaacacatccgtgtgcgctcaggcgcgtcatccatgacgcgcatgcttttcgtttccttcgcccgttacccgctgttaacctgaacggcggagtgatcaaatatgccgggatttatgccgttaccttatctatcgcctgcgtcagtttttccagttgtgccgctgtaataatgtatggcggcataatataaatcagccgtccgaacggacggatccacactccggcgtcaacaaaacggcgctgcaattctgccatattcaccggctcttccgtttcaatcacaccaatggtaccgagtacccgcgcatcgcggattccgctgcgggatttcagcggcagcagagcgctttttagttgtgtttcgatagccttcacacacgcagcccagtctccggacaacagcagatcaatactcgccactgccgtggcacaggccagcggattacccataaaggtcggaccgtgcataaagcagcctgcgtcaccctgactgatggtgtctgcaatatggcgggtggtgagggtggctgagagtgtcatataaccaccggtaatcgcttttccgagacacataatgtccggtgatatacctgcgtgttcacaggcaaacagtttaccggtgcgcccgaatccggtggcgatttcgtcacaaatcagcaggacattgtagtgatcacacagtgatcttacgcctttcagatattccggatggtaaaagcgcattccgcccgccccctggacaaccggctccaggatcacggcagcgacctcatgatgatgctgtgccagcaggttttccacagaatgaagatcttccggccgccattcctcatcaaatccgcactgcggtgcatcagcaaacaggtgatccggcagatagccctgccagagtgagtgcatggagttttgcggatcacacactgacatcgcgccgaatgtatcgccgtggtagccgtgacgcggggtgattatccggtggcgtttttcgccgcgtgcctgccagtactgcagcgccattttcagggccacttccaccgcgaccgaaccggagtcggcaggaaacacgcattccagcggctccggcgtgattgccaccagacggcggcacagtgcaacggcagccggatgagtgatcccgccgaacatcacatgtgacatctgtgacagctgttcagtcaccgccgcattcagtaccgggtgattatagccgtggatagccgcccaccaggaggacataccgtcaaccagttcgcggccgtctgcgagtgtcagcaccgcaccgtgtgccgacaccaccggatagaccggcagcggctgagtcattgatgtataagggtgccagatgtggcggcggtcaaaatccgcatcatcatccgaaaaggcgtgacctgaaatattccctgaaaaagccattatgtaaaccatttcaatgcaaataaagttgacatgataatgctgatatttaaactggcaacacttttttatcgggagttacagttatgagccaaggtcgtcagtggacattaaaagaagccaatgcattgtttgaaaaacctttttttgaactgttgtatgaagctcagaccatacatcgccggcattttgacccgcagcaggtgcagatcagcacactgctttccatcaaaaccggggcgtgtccggaagattgtaaatactgtgcgcagagtgcgcgatacaagaccgggctggaaaaagagcgtctgatggaagtacagcaggtggtggagacggcgcgtaaggcgcgggcagccggttcgacccggttctgtatgggcgcggcgtggaagaatcctcatgagcgcgatatgccgtacctggaaaccatggtgaaagaagtgcgggcgctgggtatggaaacctgcatgacactcggtatgctgaacagctcacaggcggagcgccttgccaaagcaggtctggattactataaccacaacctcgatacctcgccggaattttacggctcgattgtcaccacccggacctatcaggacagactcgacaccctcgacaatgtgcgggatgcggggatcaaagtatgctccggcgggatcttaggtttgggtgaggcggtgcgcgaccgcgcggcgatgctggtacagctggcgaatctgccgaaagcaccggaaagtgtaccgatcaacatgctggcgaaaatcaaaggcacgccgtttgaggataatgaggaagtcgatccgtttgatttcgtccgcaccatcgctgttgcccgcattatgatgccaacgtctcatgtgcgcctctccgccggtcgtgaaatgatgaatgaacagacccaggcgctttgctttatggcgggtgcgaactccattttctacggctgcaaactgctcaccaccaccaacccggaagaaaataccgatattgccctgtttaaaaagctggggatcaaacgcgaagccatccatgttacccggggtgacaatgaagagacggattctttattggatgccatcagccacagcgatgacgaaaaattctataacgcagccctgtgagccgtaccatgtggcagacttttctctctgagcgcctgcagcaggcgcaggaacaggatgcggtacgccgccgcgaggccaatgacggcgcggacgggcgcaccctcctgattaacggcagacgtgccgtgaatttctccggtaatgattatctcggcctcagccgccacccggcggtgatccgcgcctggtgtgacggtacccggcaatacggtgtgggcagcggcggatccggtcatgtcaccggttacaccacggcacaccgggacctggagcagatgctggcggagtggctcgggtttgatcgggcgatcttatttgtctccggtttcagcgctaatcaggcggtgatcaccgcactgatgcagcgcggcgaccaccttatctgcgacaaactcgctcacgcctccattatggaagcggcgatgcattcacccgctgaattcagccgttttcatcataatgataccgcccatctcagtacccggctgagtcggactgaaaacagtaccggcaaaaccctggtggtcactgaagggatcttcagtatggacggggatgccgcgccgctggcggcgatcctgtcgctcacccggcagcataacgcgcggctgatgacggatgatgcgcacggtatcggtgtctgcggccgtgaagggcggggcagttgtgatgcggcggggatacgcccggatattcagattgtcaccttcggtaaagcggtcggggccagcggcgcggcggtgctgtgcgatgcacagacggcggattatcttacgcaatatgcccgtcatcttatctacagcaccaccttcccggcggcacaggcgtgtgccattcaggcagcggtgcaggaaatccgtcacggtgacgggttacgggacacactggcggaaaacatccgcttcttccgtgaacgggtggcgcatctgccgctgcagttactgccgtccgcctcggcgatccagccgctgatcgtaggggataaccgcgcagccctggcactgtcgcactatttacaggagcgcggcctgtgggtgaaagctatccgtccgccgactgtgccaccgaataccgcccgtctgcgcatcacgctgaccagcgcccatcaccgcgacgatatcacacagcttacggaggcgctggatgcattctgccgtcactaccgcccctgtgaataaagccgctgttgccgcggctttcggacgcgccgccggacactatgacaccgtggcgcaccttcagcagaaaaccggataccatctgcgccgcctgaccacacaggcgctttccgggctgttattaccggaactgcacgggctggatgcaggctgcggtaccgggtttttcagtgaacagtggaaagcggattgccgctgtgtgacggcgtttgatctctcccctgacatgctggcacacgcccggcagcagcagcgggcgacccgttatgtgcagggggatatcgaacagctgccttttgcggataatcagtttgatttttgtttcagcaatctggcggtgcagtggtgtgattcactggcggcggcgctggccggactggtgcgggtaacccggcccggtggtgtggtggcgttttccaccctgctcagcgggtcgctggacgagctgaatcaggcgttttcccgggtggacagcaaccgtcacgccaacggttttctcagccgtgaggcggtttccgccgcctgtcagccttaccggcatactttgtcagaagtgtgttaccggctctcctttgattctctgcccgcgctgctgcactccctcaaggggattggagctacccatgttcatcagggacgtgctgccgggctgatgacacgcaataaactcattcagctggcgaatcattatcccgccgaagacggcgtatttccgctcagctatcttattcagtacggagtcatacatgttgaaaaataactggtttttaaccggcaccgatacggatgccggtaaaaccgtggtcagctgcgccctgctgcaaacggcccgcaacgccggtttctgctgcgcggggtataagccggtagcctcgggcagtgagatgacggaggaggggctgcgcaacagtgatgcactggcattgtggcggcatacggtaccggcggtcagttacgcgcagattaacccctatacctttgccgagccgacatcaccacacattgtcagcgaactgactcaaaccccgctggaattttcggtgatgactgacgggctgcatgccttaaatcagcaggctgactgggtactgaccgaaggggcgggcggatggtttacgccgctgtcggccacacaaagttatgcggactgggcggcacaaatgcggatgccggtgatcctcgtcgtcggggtgaagctcggctgcattaatcacgcgttactgactgtactggcgatacagcaggccggactgaccctggcgggctgggtggcgaatgaagtcacaccgccgggcctgcgtcagccggagtatctggcgacactgaataacctgatcccggcaccgtgcctgggtgtgttaccgcatctgccggacccgatgaatcaggacttatccggctatctttcactgccggtttccgcgcactgatcctgcatccggacggatcgtgccgggatcacggcaaatcttccggccgggtgttttttatcaggaaaaaatcctgaattattttttctctttgtgctgaaagtgacaattttatgactgcacaatgtcacgcaaccatgcaccggcaaacgactttattaagttatccactattcctgtggataaccctgtgtattaactttagaaaactcacgctatccttgcaggaacggggctttcactgacattgttgtaaaatcgggcttttatgatttattcataaataacaattagataaataaaatcaagggtcctccggcgtgaaaaatagcaattggtcagaggggcatcagatttcagcataatttaaaattgcaagtgctttttttttggggataactgtggaaagccaataaaattttccccggttttgcaagcaaaaaatcacaaaataacggattttttctgccgggggttgaagctggttttttatccagtatcatagtgaccctattcgcgcaggggggccaatgagcaaactatttaaactgcattctgactttaaaccggccggtgatcagccgcaggccattgcaaaactggttgagggcctggaagacgggctggcgcatcagacgctgcttggggtaacgggctcggggaaaaccttcaccattgccaatgttatcgccacgctgaaccgcccgaccatgatcatggcgcccaacaaaacccttgccgcgcagctttacagtgagattaaagattttttcccggaaaacgcggtggaatattttgtctcctactacgactactatcagccggaagcctatgtgccgagttctgacacctttatcgaaaaagatgcctcagtaaacgaacacattgagcagatgcggctctccgccactaaagccctgctggaacggcgggatgtggtggtggtggcgtccgtttccgctatctacgggctgggtgatccggacagctacctgaagatgatgctgcacctcaccgaggggatgatcattgatcagcgctcgatcctgcaccgcctttccgatctccagtacacccgtaacgaccaggcctttcagcgcggcacattccgtgtgcgcggcgaagtggtggatattttccctgcggaatctgatgattacgcactgcgcgtggaactgtttgatgatgaggtcgagcgcctgtcgctgtttgatccgctgaccggccatatccattatcaggtaccgcgctttaccgtttacccgaaaacccactatgtaacgccgcgtgagcgcatcattgaggcgatggaagggattaaaacggagctggcggagcggcgcaaattcctgatcgacaacaacaaactggtggaagagcagcgcctcgcccagcgcactcagtttgatctggaaatgatgaatgaactgggttactgctcgggtatcgaaaactactcacgctacctctccggacgcaaatccggtgaatccccgccgaccctgtttgattacctgccggcggacggcctgctggtaattgatgaatcccacgtcaccattccgcaaatcggcgggatgtacaaaggagaccgttcgcgcaaagaaacgctggtggagtacggtttccgtctgccgtccgcgctggataaccgtccgctgcgctttgaggagtttgaatccctcgcgccgcagagcatttatgtgtccgccacgccgggcaaatatgaaacggagaaatccgggtctgatgtggttgaacaggtggtccggccgaccgggctgctcgatccggaagtggaagtgcgtccggtgaccactcaggtggatgatctgctgtctgaaatccgcatccgcgcacagaaaaatgagcgcgtgctggtcaccacgctgaccaaacggatggcggaagatctcaccgaatatctggaagagcacggcgagcgggtgcgttatctgcactcggatatcgatacggtggaacgtgtggaaattatccgcgatctgcgtctcggggagtttgatgtgctggtgggtatcaacctgctgcgtgaggggctggatatgccggaagtgtcgctggtggcgattctggatgcggacaaagaaggcttcctgcgttccgaacgttcactgatccagaccattggtcgtgccgcccgtaacctgcacggcaaagcgattctctacggcgataaaatcactgactcaatggcgagggctattgaggaaaccgaacgccgcagagagaagcagatggcgtttaacgaagcaaacggtattgtgccgaaagggctgaataaaaagattggcgatatccttaaaatcggccagccgtcagccggggcgaagaataaaggcaaagggaaagcagccgcgaaaagcagcgattatcagcgtatgtcgccgaaagagctggaagttaaaattcaggagctggaagcacagatgtaccgccacgctcaggatctggaatttgaacaggcggcagcggtacgggatgaattacaggggctgcgtgagcagtttattgccaactcctgacgggatcagggcagcagggcgattgttttatccagcgcactcagcagcaggcggcggtcatggcggtacggtacatcctgtgcctccaggacctctctgacaatcaggcggtcgccgaggtcgccggtattgatatgcggtgcgcacaccactgcatctatccgtttgcggccgatgcgtttttcaatcacggcgattttttcactcaggctgagggacgccgcggccgggctcagttctttgccgagattctcaatatagatcatcggcgcctgattaaaattaatggctttggtgaaatcgggcagcagcatcagcggcatcaggctggtaaagaaactgcccggcccgataataatcagttccgcgcggcagatggcatccagcgcctctttggtggttttcaccggcggggatagctgtaactcctgcggcgggcaggtcagctgatcgacattcacttcgccgtacacttcatgaccttcgctgtcgatagccatcaggtcgaccggcgtttccgacatcggtatcaatttagctttgactttcagcatattgcggatcagattgatggcatccagcggacgcacactcatatgatccagcgccttgagcatcaggttgccgaggttatgtcccgccagttcgccgttaccgctaaaacggtattcaaacatggtggaagcaatcgacggctccgtgatcatctgattgagacagttgcgcatatcgccccaggcaatgccgccctccgcccggcggatccggccggtggagccgccgttatccgtggtggtgaccacgccggtcagccgcgatcccagaccgttcaggcaggacatcacccgtcccagcccgtggcctccgcctaaagcaacaacatgttccagcgacgtgagtgtgcggtttcccatagtgtttatgcattccctgagttttcatatttatttgcgcggtaatctatcataaaaaccaatttttcgcgtcacgatactgagatttatcaaactccggtcaatcataaagataaattatctttttgctgcgtacttttacgtgtgattcagaagtggcagcggcagggaagtcatggtatgagtgaatgcggtgactgaaagcatcacaaataaacatcaataacaaaaatcaataaatgacaggaagaacatcatgaatgacctgacgtgcaccattccggtgctggaaactgaccgtctgatcctgagtgcccaccgcagagaagatcatgcggcggttgctgatatgtggtcagacacggtggtaacgcatcatgttatggcaggacaaatctccacaccgcgtgacagctggatgcggatgctggcgtatctcgggttgtggccgctgctgggctatggttactgggcggtcagggagaaaagcaccggagagtatatcggggatatcggttttgcggatttttaccgtgaaatggaaaaagacatcagccactatccggaagcgggttgggtgtttacaaagcgggcacacggtaagggctatgccggtgaagcattgggagccatactgaactggctgaaagaggtgcgcggtattaatgaatgcgtgtgtattattgctccagagaataaaccctccatccggctggcagagcgtaacggattccgcccgcaggagacactgagaatgaatcataaatccgttattttctatcacgttacactggactgaccgggcctgctatacctgtgtcagatcaagaaaccggtaaataattttcctgtcaaaccgccgtatttccggcggtttgctgtttattatttattcagtaatctataatgtatttgctaattaattgaaaaactgtgtgaaattttcgttatccggcgtatccgttccttttcccggaggcccggtaactcgttgtataataagatatatagcgtatttatcatggtaattcccgcagggcaacgctagaatcaactcacttagcgtggttattaacagcattaatgacaacgattaactcctagccttcacacctacgtttcaggtcggaaccggaaatagggtgagctggccgtgacactcacgagtgccaccagggtgcaggatagaaatgtccgcatctcccgtatttggaaaggtgttatgactgaacaactgacagatccctttgcgcgcaaattttactatctgcgcctctccgtgacagacgtttgcaatttccgttgcaactattgtctgcctgatggttataaaccaaacggacacaaatcctttctttctctcggcgaaatccgccgggtgacccgcgcgtttgctcagctgggcacggaaaaaatccgtctgaccggcggtgagccgaccatgcgccgcgattttaccgatatcgttgccgctatccgcgaaaatgagaatatccgcaccattgccgtgaccaccaacggttaccgcatggcacgggatatccgcgactggcgtgccgccgggctgagcgccgtgaatgtcagtgtggatagtctcgacccgcgccagtttcatgctatcaccgggcaggataaattcatgcaggtgatgagtggtatcgatgccgcgtttgaggccggttttgagaaggtaaaagtgaatgtggtgctgatgaagaatgtcaatgacatccatctgcctgcatttctgaactggattaaagaccgcccgatccagctgcgttttatcgaattgatggaaaccggtgacggcagcgatgtattccgccgtttccatatctccggcaatgttatccgtgcccgtctgttacaggcaggctggcagcaggtggcgcgtgcccgaagtgacggcccggcacaggtgttcagtcatccggattatcagggcgaaatcggcctgattatgccgtatgaaaaagacttctgccagagctgtaatcgtctgcgggtgtccgcggtcggtaatctgcatctgtgcctgttcggcgagcaggggatcacactgcgtgatctgctggcggaagacggacacgatgcggagctgaaagcacggcttcagcgcgcattgcagcacaaacgcgaaacccatttcctccatcagggggacagcggtattaccccgaatttatccgttatcggcggctgatccgccggtcatatcaggagtttacatgtctcaactcacccatattaatgcggcgggcgaagccaacatggtggatgtgtccggaaagcaggaaactgtccgcgaagcgcgcgccgaagcctttatcaccatggatgccaaaaccttacagatgattattgacggcaaccatcacaagggggatgtctttgcgacagcccgtatcgccggtatccaggccgctaaacgaacctgggatctgatcccgctgtgtcacccgctgatgctgagcaaagtggaggttcagctgagcgcggagccggacacatcccgtgtgcgtattgaatcctgctgccgcctgaccggtaaaaccggggtggagatggaagccctgactgcggcttctgtggcggcactgacgatttatgatatgtgcaaagcggtgcagaaggatatggttatcggcccggtgcgtttactggaaaaaagcggcgggaaatcaggacattttaaggcggacgcatgattaaggtactgtttttcgcgcaggtgcgcgagctggtgaataccgatgagctttctctgccgtgtgattacgccacagcggaagatttgcgggccgcgctgtgtgagcgcggtgaacgctgggcactggcgctggaatccggcaaactgctgtgtgcggtgaatcagtcttttgtgccgttgtcgcacccgctgacagacggtgacgaagtcgcgttcttcccgccggtcaccggaggctgagccatgaataatacccggattgctgttcagacggacaatttcagtgtcggtgaggaatatcagtggctggccggttgcgcggatgacggcgcagtggtcacattcaccggtaaagtccgcaatcataacctgggtgataatgtggcggctctgtcgctggagcactacccgggcatgaccgaaaaagcgctggcggatattgtcacacaggcgcgtgagcgctgggaattacagcgggtgacgctgatccacagggtcggcagtttatacccgaatgatgagattgtgtttgtcggtgtcagcgccgcccatcgcggcatggcatttgaagcggctgaatttctgatggattacttaaaaacccgcgcgccgttctggaaaaaagagacattgccggaaggcggtacccgctgggtggatgccagagaaagcgaccagaaagccgcagatcgctggtaatttaccgctgataacctcctgatcgccggattttttccggcggctgtacatcaggttaaaaatattctctgtttgtaaagaaatggggagaattcctgacagtttgcctgctggcaacaccctttttatgtgataatctatagtccttggtcgtttatcatccgataaacaatttgatacagatgaaagggttatccatcatggaccgatttcctcgttctaacggctcgatagtttcacaggcgggctccggtattcaggcttatatggcccaggtttacggctggatggctgtgggtctgttactgaccgcgtttgttgctttttatgcatcaaacgacgccaacataatgaattttatttattccagcaagattgtcttttttggcctgattattgcccaactgggattagtctgggtcatttccggcatgattgagcgcctgagtggtgccgcagccaccggtctgtttatgctttactctgttctgaccggactgacattatccagtatctttattatttatacgtcatcgtctattgccagcaccttctttatcacggcagggatgttcggtgcgctgagtatctacggctacaccaccaagcgcagcctgtccgggatgggtaacttcctgtttatggggctgattggtattatcatcgcgtcactggttaatatctggctgaaaagcgaaggtatgacactgatcatcacctatatcggtgtgattgtgtttgccggtctgaccgcgtatgacactcagaaactgcgtgagctgggtgagcagattgacagcaacaacaaagacaccatgcgccgctatgcgatcgtgggtgcgctgtcgctgtacctggatttcatcaacctgttcctgatgctgctgcgcctgatgggcgaccgccgctaatcacagacagaacaggatgtaacaataaaaggccggtgaaaaccggcctttttacgttctgattcacgcaatcttccgccggaacaacgtataggcggcggttcctgtggtcacggcgatcaccagtaacggccagaggctttggcggataacactgaaatccgcatctttgaggtaaatctgtttggtaatttcattgaaatgacggataggattgacccaggtgatatgttgcagccagaccggcatattctccaccggggcaatataaccggacagcagcacggcaggcatcataaagacaaacacaccgataaaggcctgctgctgggtggcggaaagcgcggagattaacaggccgaacccgaccagcgacaagccgtacaccatcatggtgaaataaaacagaagcagtgagccggagaaggggatgcggtaagcaaaaatgccgatcaccagcacaatactggcctggaccgtggccactatcagtgccggaactgccttaccaacaaagatttcaccggtggtcagcggcgaaaccagcaactgatccagcgtaccctgttcccgctcacgggcaacagagagagaggtgacaatcatcacgccgatggtggtgatcagcgccaccagcgacggcacgataaaccatttgtaatccagattcgggttataccagttgcgcaccaccagctcactggtgaccgcctgcggcatccgctcctgctggtaatgcgcggtgatttgctgaacataattggcggcaatctgcgcactgttggagtttcgtccgtcgagcaggatttgcagctgtgccggtttctgtgcggcgagctgtgcactgaaattctgcgggaaatgcaccagcagcagggctttgcggttatcaatcacatcctgtacatcatgccggttctggatcagcagcacatcagaaaacgcactggctttggcaaactgctgggtcagttcaatggatgcggggcctttgtcctcatcataaatggcgatagtggcgttggtgacttccagcgttgccgccagcgggaacaaaatcatctgaaaaattaccggtacgatcaggatcgtccgggtctgccgctctcggagaagtaattgcagctctttgataattaaggtgagtatccgatgaaacatggcagtctccttaatcaagccggcggcgggttttcagggcggtcaggccgataaacacaagcgctgacaggatcagcaacaccagattactgataatcaccggcataatattacccgccaggaacagtgtctgcaggctttccacaaagtagcgcgccgggatcacataagttaccacctgtatcgccaccggcatactgtcaatttcaaacacaaagccggacagcataatcgcaggcagaaatgcggcgttcagcgaaatcatagccgcgttaaactgattgcgggtcacggtggatatcagcaatcccataccaagcgcggtggcgagatagagggaggtcaccagggccagaagccacagcgagccgtgatacggcacatccagcacatacacggtcaccaccatacacagcaccatgacaaagctgccgagcacctgatacggcagcagtttggagagcagcagttccgttttggtcacctgtgttgagagcagggcttccatggtgccgcgctcccattcccgtgccaccaccagtgaggtcaggatagcgccgaccacggtaataatgatgctgatagcccccgggataataaaatgctggctgatagccgcagggttaaaccagtagcgcagccggacatcaacaggcggttcactgctgatcccccgatcctgtgcccgctgctgctgccagatctgccagataccgctggcatagccctgcacaaagttagcggtattgggctcgctgccgtccgtaatcacctgaatctgtgcgatatcgccctgacgggccagacgtttgtccaaatccgccgggagcaccacaataccgcggatatgccccgcctggagtttatcaattaattcacggcggttatcactgagggtggcatcaataaacggagagccggtaaaggcgttgatcagctcccgcgccggttcgctctgctgattcaccagaatcccgaggcgcagttttgatgaatccagattgataccgtaaccgaaaataaataacagaatcagcgggatcacaattgcgatcagggcactcgacgggtcgcggacaatctgtttgctctctttgatgcacagcgcccgcagacggcgccatgaaaaaccggaaggtgtgctcatgatgcagcctcctgtgcgctttctttgtcatactcctcgaccagcccgataaaggcatcttccattgacggatcaggacgggtgtcgtctgccaccgaggctttcagctcatcaggggtaccggcggcaatgattttgccgtgatagaccagccctatgcggtcacaatattccgcctcatccataaagtgagtggtcaccatcacggtgacgcctttatccaccatgccgttaatatgcagccagaattcacggcgggtgagcgggtcaaccccggaggtgggttcatcgagaaagagaatatccggctcatgcatcagggcgcaggccagcgccagccgctgtttgaagccgagcggcaaatcttcggtggtctggcgcaggatcggggtgaaattaaaggcattcaccatatcatcgattttctgctgctgcgctttgccgcgcagcccgtaagcgccggagaaaaatttcaggttctgggcgaccgtcagattgccgtagagggaaaacttctgcgccatataacccaggcggctgcgggctttggctgagctggttttcagatccagccccagcaccagagcgcggccgctgctcgggatcatcaggccgcacatcatcttaaaggtggtggatttgcccgcaccgttcgggccgagcaggccgaaaatctccccgcgtttgacctgaaaatccacatgatcggtcgcggcaaaatcgccgaattttttcgtcagactgacggcttcaatcacggtttcatccggtgccgccgggatctgcggcataatctgcgccagctgtgagcggtgagaagggccgccgccgagcagatcaataaatgcgtcctcaaaacggggcttagcaggcagcagctctgcatccgggcatttcagcgcgctgagcagggtgtgggtatcggcctgtggttttacaatcagccggacataacgtccctgaataacaccatcagacacctgtggctgaatcaatgcctcctgtaagatgcggcggcgttcaccgggggctgcggagagcaggaaagagcggccttccatcgtttctgtcagttgtgccggtttgccctcataaatgacttttccctgattgagcagcagcacatcgcggcactgttctgcctcatccagataagaggtactccagaggatcagcatgccgtcatcggcgagagtgtgcaccatccgccacagttcgcggcgggcgataggatcgactcccacacccggctcatcgagcagcagcacctgcggctgcccgagcagtgtgcaggccagtccgagcttctgtttcatgccgccggagagtttgcccgccatgcggccggtaaaacgggtcaggtcagtaaaggtcagcaggcggtcaaaaacagcctgctgttcatggtgcggcagaccgcgcagttcggcatataaacggaggttttccatcacggacagatcttcatacagcccgaatttctgcggcatataaccgagctgtgcgcgcaaagccacactgtcttcaatcggatcaaacccggccacgcggatctccccgccgtctggtttcagtaatccggccagcatgcggatgagggtagttttcccggcaccgtccggcccggcaagcccggtcacaccgccgccccggatggtggtggtcagccggtcaactgccggattatcaaggccgggaaagcatttttcgacggcactgagggagatagtgatgtctggcatcgtctctccttacggctgctgctcttcattatcaaagcggatagtgaccggcatcccctgacgcagcagcgggtcggcatccgtcaccacaatgcgcagacggtagaccagatctgtccgcagtgccggggtttcaacggatttcggggtaaactcggcagtcggggagacaaatccgacatgcccgtgatacggtttgcccgggcggctgtcggtttccagtaatactttacggccgggctgtgcctgtcccagctcgctttcgctgacatacgcccgtacccacaccggattggtcagtgtcagggtgaacacggtgctgcctgccggtaaaatcgtgccgggctcgatggcgcgggtcagaatagtacctgctgccggtgcggtcagacgggtgtctgccaggtcaagctgtgcctgctccacggcggcttcagcctgtttcagctgtccgcgcgcttcggcaatctcttctttgcggtaaccgttttccagttggttcagtttgtcctgtgaggctttcagtgccgcatcggcctgattgcgctgattacgggcattttccaggtcattggcggagatagcacggcttttcatcagtccggcctggcgctgataaaactgacgggcaaactccgccgctgccgtattacgggcaacatcggcttttgcctgcgcgatttcttccggccggtagccggcttccatcagcagtaatgccgcctgcgcgctgtcccgtaccccttccgctttcagcagggcgtgacggtacggtgtatcatccagcataccgagcagctcaccgggctgaaccgccgccccttcatccgcattcagggattgcagtttgccgccgacacgaaaaccaagattcaccgtccggatatccacattaccgtacagcagagcaggccccgacgggcgcgactcccaccagtaccatccgccggcaccggccagcaggatcagaataatgataaatatcccggtttttttcattggcttcatgaattgattcctggtgagttatcagagacagcggtgtatcagttgcggtaatgctgctttaatccgctgagcagcaaccggatatgttcccgcagcacatcattgatcatgtcatactctttcgggccgatattatcccagccggtctggcgcagcaggttttcccgtgccagacggaaagataaaatctcacccatcagagcgtgtgtatggatcagcgtattgatatgtccgtccggcagcccggtataacgggcaactaatctggcctggcgggtaaaaatcgcagacagcgcctgttcgtggataagcgtgtaagctttggtcggaattaactgctcgcgcgacataatccggctgatattaatattacttttcttcagtaccagctcattgtaggcaagaaaactcagttcaatcagttgcagacagcggctttcatcccgttcgtcagcgccgttttccagaaacagatcaatttcttcaatgacaggacggaattcatcacggataatgtcggcaatatgctgtgcaacggccagatacaacccgtcttttgagccgaaataataagcaatagctgcgatattttgatccgcacgttgtgcaatctggcgagtagtggcactatttgggccgttcagtccgaaaatctcaatagcggcttccagtaaagcgagtttggcttgttcgcctcgcggcgtattagtcgtattgactgacatggcgtatatccttatgggtgtgtcggcataaacgagagatcaatcatatgattaactgtatgctcatcagtatctgttgtaaatgagcagtaagcaacggattgatcacagacgtattttatcgatatttcttccggagtgacggattaattttcgacattcaattatcagcaggccccgcagacaacagaccggggcggagtcttaacaattcatgagtttttcatcattaccattatgcccggaaattcagaaggccgtcgcagagatgggctacgaacagccgaccccgattcagatgcaggccattccgcaggttcttgccggacatgacttattagccagcgcacaaaccggtaccggaaaaaccgccggttttaccttacctatcctgcaatatttacaggataatccgcgcaaaggcggcgggcgtccggtccgcgcgctgattttgtccccgacccgtgaactagccgctcagatcggcgaaaacgtccgcgagtacagccgccatctgcgcacccgttcgctggtggtcttcggcggggtgagcatcaacccgcaaatgatgaaactgcgcggcggcgtggatatcctgattgccactccgggccgtctgctggatctggaacatcagaatgccgtggatttatccaaagtcgaaattctggtgctggatgaagctgaccgcatgctggatatgggctttatccatgatatccgccgtgttatcaaaaaattaccggtgaaacgtcagaatttactgttttccgcgacattctccaatggtatcaaatctctggcgaataccattctgaataatccggtgacggtggaagtttccccgcgcaacagtgcctcacagcaggtcacacagtttgttcatctggtggataaaaaacgcaaagcagaactgctggcgcacctgattggccgtgataactgggagcaggtgctgattttcacccgcaccaaacacggtgccaatcgtctggcggaattccttaacgacagcggcatcaaagcggcggctatccacggtaataaatcccagggcgcacgtacccgtgcactggcggatttcaaaagcggcgctatccgcgctctggtcgcgactgatatcgcggcacgcggtctggatatcgagcagctgccgtatgtggtgaactatgaactgccgaatgtggcggaagattatgtccaccgtatcggccgtaccgggcgtgcggaggctaccggcctggcattatcactggtatgtgtcgatgagcatgacttattacgtgacattgaaaaactgctgaaaaagcaaatcgagcggatggctgaaccgggttacgatccggatccgtccatcaaagccgaacctatccagaaagcgaagcagggtcgcggcggcaacggacgttccggcggaggacgtcagggcggacagggtcgcagcgccgaaggccgcggtaacagcggtggcggtgacaaacgtccgccgcgtccgcgtcagcacaaaccgcgttccggcaacagcgactccggcagcccgtggggtaaccggggcaaataacggaaccggctcatgcgtgttcttttagcaccaatgcagggggtcttagaccccctcgtccgtcatctgctgacggcggtgaatgactatgatctctgtatcaccgagtttgtccgtgtggtggatatgctgctgccggagaaactgtttttccgtctctgtccggagctggaaaacggcggtctgaccgaatccggtacgccggtgcggatccagctgctggggcagttcccgcaatggctggcggaaaatgccgcacgtgcggcggaactcggctcgcacggggtggatctcaactgcggctgcccgtccaaaacagtgaacggcagcggcggcggggcgatgcttcttaaagacccggagctgatttatcagggcaccaaagctatccgtgaagcggtaccggcacatctgccggtgtcggtgaaagtgcggctcggctggagcagcaatgcgcaccagtttgaaatcgccgatgcggtggcacaaggcggggcaaccgagatcacagtgcacgggcgcaccaaagaagcaggctatcgtgcggatctgattgactggccggcgatcgcggctatccgtcagcggctctccattccggtgattgccaacggcgaagtccgtgactggcagagtgcgcagcaatgcctggctgtgaccggctgtgatgcggtgatgctcgggcgcggggcgctcaatgtgccgaacctgagctgtgtggttaaatataacgcgccctttatgccgtggccggaagtggtggctttgttgtaccgctacacgcagctggaaaagcagggtgataccgggctgtaccatgtggcgcgtatcaaacagtggttcagctatctgcataaagcctattcgcaggaagcggatgaactttttgccgtgatccgcccgctgaaagattctgcctcgattgcacaggcgattgcccgggctcagggtgcataaaatttgctttttttgccatatcgcactttaattgacaggtgagccggattttttcttaacccgttaatacagcaggaggtactgatgaattttctgtcctggattatttttggcctgatcgccggtgtgctggcgaaatggattatgcccggaacctatagtatcggcattattatgacgattgtactgggtgttgttggtgctgttgtcgggggatatatcagtgttttcttcggcaaggggcgtgtcgacgggtttaatttcggcagctttgtggtagcggtgatcggtgcgatggtggtgctgtttctcgccgggaagtttgcgggctgacagccgcataacagatttaaaaaatgccggagcagctgacgcgctccggcatttttttatggttcaatcggcagggtgtctgagccgccccattccgcccaggaaccgtcatacagacggacattctgatggccggtgagtgtcagcgccagcagcagtatggcggctgtcataccggaaccgcaggacaccaccaggtatttgcttaaatccacacccgcatcacggaatatctgctgaatctgcgtcggggatttgaagatcccgttctccaccagggtattccacggtacattgcaactgccgggaatatggcctgaacgcacgccgggacgcggatccggtgccagcgcctgaaaacggtcggcagaacgggcatcgacaatctgaatttccggatccgtaattgccagcagcacatcatctttatttaccgcattatgacgctgaaactccggcacaaaggttttcgcctgcggcagcggcagctcaccgctttcggtggtataaccggcaccggcccaggcattcagtccgccctgtaaaatacgcagatttttcacaccgaaggttttcagtgtccaccaggcgcgcggggcggaaaacaggttaccctggtcataaataatcaccatggtgtcattatcgatcccgaattcaccggcagcctgtgcgaacacttccggtgacggcagcatatgcggcagcggggaagagagatcagccactttgtccagatcaaaatagtgtgcgcccggaatatggcgctcaagccataactgatggcaatctgcgggctgaccgggcggcgctttgctgacatcgagcacaacaagattgtcgtcattcaggtgcgtgtgcagccagtctgcggtcacaaaatagtctcggtacatcgcaattaacctcgttagcaggacgcagagagctaccgggtttctccggtggttgtttcctgcgccgtggatggagtctcaggggcaaccgaacgattatacatattcattccggcaagaaaaacgccgccgagggagccgaaggcaaaaataaaaatgaaaataatcaataatttcttcatagatgtattctggtcttatctggtggagcctgtctgccggacaaatccgggggctatgttgattaattgtaacaaactattgaagcaaccgtatgcagaaaatgagcggtaacggcccggacatgctgattttttttctgtagtgtgaaacaatagcgccctgtttatttatccataggtttttcagatgcccctttccgccaccgtcaaacaacaaatcagcgcctggtacaaagccctgccggagcagattgacggctttgtcccgcgcgccccgcagcgggaaatgattgcggaagttgcccggacgatggcgggtgatgaaggacggcatctggtgattgaagccccgaccggggtgggaaaaaccctctcttatctgatcccgggcattgcggtcgcgcgggaacagcaaaagctgctggtgatcagcaccgccaatgtcgcgttgcaggatcagatctacagcaaagatctgccgctgctggcaaaaattatccctgacctgcgttttaccggtgcgttcgggcgcgggcgctacgtgtgtccgcgcaatatggcggtgatcggcgcggcggaaggggaacagatcgacctgatgctgctgctcgaagacaaggcagatgtggcaacggcctctgaacgcgatactgtgcgcaagctgcagaatgattttacctctttcggctgggacggcctgcgcgatcaccacaaaacctccattccggacagcctgtggcgcaaaatcagcactgataaactcagttgtctcggccgcaactgccagtattactcgcgctgtccgtttttcctggcgcggcgtgaaattgaaagtgtggatgtggtggtcgccaaccatgcgctggtgatggcggcaatggagaatgaatcggttttgccggaaagcaaaaaactgctgctggtgctggatgaaggacaccatatcgctgatgtggcccgtgattccctggaagtggaaggggatatcaccctggtatcacttcaggcgcagctggacaacctttcccgctttgtcactcagtatctgcaacagttccgtccgctaaaaccgccgaaactggcggacagcgcccgtctgcaaaaacatctggacgcgatgtcagatgtgtaccgcgatatggcgatgtacacacaggcgctgctgccggagcaggcggcggatccgcactatttgtttccgctcggggaactgccggaaccgctgacggcagcggctcagcaactgtcaaaacagacggatgctctgcacagcatggtggaggggatactcagtgatctgaacgaacagacggcaaaacaggatattgtccgtctgcaccgcgccatcctcacggccggaaagttcctcggtgcactggaaaacagcgccaaactgtggcgtctggcggcgctgtcggaaatctcacacgcgccggtctcaaagtggctcagccgccgctatgaaaaaaatcagtctcacctctggttccactgcgcggggatccgcgtcagcgaacagctcggccacctgttatggcgcaatgtaccgaatattgtggtgacctcggcaaccctgcgttcactcaacagtttcagccggttacaggaaatgaccgggctgagtgaaaaggcggacgaccgctttgtggctctcgattctccgtttgatcactgccgtcaggggcggctggtgatcccgaaaatgcattatgaaccgacaccggccgatgaagccgcacatatcggggagatggcgcgttatttccgctcccagctggcgtccggtgagcaccgcggcatgctggtgctgtttaacagccagcgggcaatggatctgtttctcacccatgtgacggatttacgtctgcaactgctggtgcagggggatcagccccgttaccggctggtggaaacccattgtcagcggatccgggacgggcagaacagtgtgcttatcggcctgcattcttttgccgaaggtcttgatctgaaaggggattacctgactcaggtgcatattcacaaaatcgcgtttccgccggtcaccaacccggtgattatcacggaaaacgactggctgaaatccctgaaccgctacccgtttgaaatccagagcctgccgggagcgtcatttacgctgattcagcaggtcgggcggctgatccgcagtcatcagtgtcacggggatgtggtaatttacgaccagcgcctgctgaccaaacggtacggcagcaggctgcttaatgcattaccggtctttccgattgtgcggccggatattgaaccggaaaaataattaaacgggtgagcgttattctgctgtggcggtaaaggttgagtcactgccgtaatcattgatattgctgataatcagccggtctccgcgtttcaccgcgcgttttaccgcgatgtctgaacggctcttcggtgtcagcataaacgatttatgtaatatctgttttttatccgccagcgttatttccgtaatggtaatgtgatacggcgaattattatttatcaggattgaatgattacctggctgaaaggttatctgctgagtggcggtatctctgtcgcttaatccggcagggcggtaaaacattttaaaccgggaacgaacggcaagctggacggagtcgttctcttcctgcggggacgttttactgaccggcggaatatccagaacattcagccaccacagacttcctctgtcggccggtatggcgcttttatccaacagacggatacgcagtatctggtttgcgccgggattaatacgtgaaatcggcggggtcagttcaaacggtgtgacaggcaatttcgcgggcagagcctcggaatcgcccgggtcaagccagtactgaacaaatgccgcagtggcggattcattatttatccgtgccgtaatatcgtgagcacctttcggataaatataccgtgtgctattcgcactgataccgtcagcgaaagaaaaggcactgataaaatacccgataaataacagatatgatttcattttatttccccgctgtgcacgaagaaatacacagacaggtattattactgagaaaattacctgccatgattacgtattaacgtattccctttatttcatttaattttatgcgttttttttgtttttgaaatacgtatgttttcttggttttgtttattacggaataccgttaataccgaaaaataataagcaaaaaaaaccgcccggaggcggtataaagggtaggattgactcactaggtcttactgtttttattgtctgcgacacatactcacacatgagatgtttatttcagcaccgtaacccgccggctgcggtgccgtatttctgactattattcgatattggcttcgatgaaccacaggtactggtcgaggtcgcgggaggcggcagtaaacatatctgcggtattttcatcctcaacgcggctgacggcacggcggatatcgttggcgacgatggcataacggtcggccagtgctttcaggtgatcctgcacggtgtggatatcggtcggataagccggtaaagcagaggctttactgacagcctgtgaagtaccgagtgccacaccgccgagctgaacagcgcgttcggcaaaggtatccaggtggctgttgaggctgtcacggaagccgtccagcatttcatgtacagcaatgaaattgcggccgcgtagattccagtgcgcctgtttggtcatcagcgacaggtcgataaactgcagaacctgatgattcagttcatcaatggtttcctgcttaatatcatcagtgacatcgttacgggtgtacactaagtgagaagctgtggttttcactaatttcgcggtgctcattattgttccccttatttattccgttaaacatctttgtttcgatggggttactatagggcagcgcagatgatagttaaattcgattaaatctatagaatcgataggtaaaccggcacgaggccggtttcagtatggcgggtgattactcaacagctttgatttttgactttggtttgatggtcagtgccgcgcccatggaggcgatgacaatgcagctcagcgccagccattgtgtgaataacagatgctcgctcaggaagataatacccaccattgcgccaattaccggctcaaggctcatcagtatgccgaatgtccgtgtcggcaggcgggtcagtgccaccatctccagcgagtacgggaaggccgttgataagatagccaccgccaccccgaccggcagtaccgcccagctgaacatcacactgagatcactgtgataagcccctaccggaaaaaaaatcagtgcggcgataagtgagccgacggaaaccgtggctgcgccgtaaaagcgtccggcccgctggccgaagataatatagagtgcccagcccgccccggcacccagggcatacagcatccccaccggatccagctgattaatctgtccgatctgctcaccgagcggcagcagaaaggcgagaccggcgatcaccagaataatccagagataatccgttattttccgtgccccgaacatagcaaccgccagcggcccggtaaactccagggcgactgcaatcccgagcggaatggtggacagcgccagatagaacagatagttcatcgccccgagcgagaggccgtatcccagcatcggcagcaaagactcacgggtaaaacgcagccgccagggtttaaaaatcaccagcagaatcgctgtacccagcagtaatcgcagggcggtcacacccggggcaccaataaccggaaacagggtttttgccagtgaggcaccgctctgaatagagatcatcgacagcagcaataagccgatcggtaaccacggagaaccactttgctggcggggagacgcagacatgaagaacctcgggagcaataaaaatgcggtgagacaattagttatgttgaattgcatgcaaaaggcagaactcgtcctgcaatcttagcggggcggctgacggatagcaattactgatttaagaggatattaatccgcagacagcgattgctgggtaatatagcaaaatctgacgagtgctatcttcagaccgcttgcgtatactgactgccggattttcatttcatcacgataaggacagggcagatatgcgggatattaaacgaatagcagtctattgcggatcagctgcaggtgcatcagagatttaccgccttgaggccgtgaaatttgcccggattctggttgagcagggaattaccctggtttacggtggtgccagtgtggggatcatggggacggtggcggataccgtactccgcgaaggcgggaaggccatcggcgtgatcccggcattgctggaaggacgggagattgctcataaaaacctgactgagcttcatcgcgtcagcaccatgcatgaacgtaaaagcaaaatgattgaactggcggacggctttgtcgcgctgccgggcggcttcggtaccctggatgagtttgctgaggtctttacctggagtcagatcgggctgcatcagaagccggtcgggctgatgaatatcaataattattatgacccgctgctgtctctgatcagcaaaatgaccgatgagcagtttatgcaggaaaaataccgccatatggcggtagtcgaaactgacggtaacgcgcttatccgccgcttccgtgactatgaggcacctgcggtcaaaacctacgattaaccggagaatactatgataatccgccctgccgcactgaatgacactgatcgcattgctgagctttatcagcagttatttactctgatggcggaatatcagcccgaccgctggcgcccggcgcagcaggatcgcggatttatcgaaaacgctgtgacagatgaaaagttctgtctgctggtggcggaaacggaagggcatattgccgggttcgcctttgcgcagacgcaggttacctcaccttatacctgtgtggtgccgcgtcgtttcggttatatctttgatattgtggttgatccggcggtacgcggacagggcaccggaaaaaaattactggatgctgttaaagactggtcaaaggcacagggccatacgcatctggagttgtcagtgctgccggaaaacaccggtgccatgcgtttatatgagcgcgaaggctatcagccggtgatccacacactggcgattaagcactgagataaaaaaacctcatcgcaggatgaggttttggtttatcagactgcggattaccgtcagttggtcagatgaacggttttaccgccgacaatggtgcgcagtactttcacattggcaatatcatcagcaggtatctgaaacacattgcgatccagcacgatcatatcagccagtttgcccggctccagggaaccgagaatatcttcccggtgctgagcataagccgagtcaatcgtggcggcacgcagcacttccgtgacagtcaggtcacggtcggtgtccagacgctgtgccggctgaccgttgaccggatgaccacggcgggtggcggccactttcagatcataccattcatcaaaatcatcaatcggccagtcactgccgaacgcaacgaccgcaccggcatcaataaacttaccgataggctccagctgctgaaaacgggtttcaccgatcatattgcgggtgaattccgccagttccgcagtcggtgccgcccactggaaggagaggcaggcaatggtgccgagtctggcgaaacgcgcgtaatctttggcatccaccagctcattgtgagccagtcccggacggatatctttgcccggatgcgcagcccgcattttttcgatgccgttgagcaccatatcaaccgcaccttcaccgacagtatgcagatgcggatcgtacccggcagctgcgatacgttcgagcagggcatcgatcacctctgaagtgaaatagagatcaccgtaattttctgtctcacgccagtccggttgtgccggggtgccgtgattgatgcggtacggtttcagcagggaggcggtcatggtcgggaactgaagcacaccatcaacaaacattttaatgttttttaccgcgatgcccggttccgggccccattcaggctgatgatagcgctccgcaaaggcaacggcgttttgcacggcctgcggcacggatgccacatccggcgcatcatccggcgtgatttcacgggcagcctgcacacgcagtgtcagttcaccctgctcctgtaatgcacggaacgcatccagctgtaattctgccacacgtgcatccatgaccatggtgacgccctgttcattgaggactttctgcaccagacgggcgacatccactgcgcggtcagcctgaatggagggaatactgtctgccgcacgcatcgccggggcatcctcaagaattccgttcagttcaccattggcgtgtttgccgattttaccgtcactcggtgccggggtttctctggtgatgccgaacagctccagcgcacggctgttggcaagcagggtatggcagtcattggagaacaatacgacagggcggcgggtattgagcttgtccatatcttcgcggtacatatcaataccggccggtaacatgccctgacgcagccaggcggtcactttcagccagtcattttcgccggtgcgcggatcattatccagatgcgcctgcacacgggcgaggatctcatcaatggtcagggattcataattcagatggcagccgaacaactgaataccgccccagaacgggtgcatatgaccatcaataatccccggcatcatcattttgccgtcgaggtcgataaactgtgtatgctcaccacggaatgctgccatgtcatcattatcaccacaggcaagaatacggccgtcagcaatggcgatggccccggcgacgcggttttccgcatccgcagtatagatataaccgttgtgataaataatatcagcggcagtcattttcattatgctctccaatcctcatcaacagagttaattgataattaagtgagtttcttcttccgtgattgacggcggacggcgggtaaagaagcgggtgatcacaccgaggtataccacaccgatccccagccagatcaggccgacagtcagtgcctgagcatccaggctggtccacagccacagggtcagcagcaccccgatagccggtaccaccagacaacgcaggatcacagcagccgtcagcggttctttccggtcaataataaagtgtttgataacacacagatttacaaaggtaaatgcaatcagtgcgccgaagcttatcatggacgccaccaggctcagggagagcaccagcgccatcagtgaggcgagggcgacaaacaggatcgacagtaccggagtgttgaatctggcatgcagacgggcaaatactgagcgcggcagcaccccttcacggcccatggcataaaaaatccgcacaatactggcctgggatgtcatcgcggaggcaaacacgccgatcacataggcggtaataaaggaggacgccatcagtgcaccaccgactttttccatcacctgaatactggcgatatcggtgttcggcaggaaatcacgccacgccggatagctcaggtgtgcggcgtaagagataatgataaataatgtcccggcaataaacacggtatagaggattgctttcggcagcgcccgtttggcgtctttggtctcttccgccatggtggagatggcatcaaacccgaggaatgcgagacacagaaccgccgcaccggcaaacagcccggacacctgatcagacatcaccgtcagcggggcgagcagcgcctctttatccagtgtgaacgcggaactgaagctgagatacaggaacagcgtgataaatatcagctgcatcacaatgatcagcatattcatcgaggtgaccagtttgatcccgagaatattcagcacagagacaatcacaatagtggagacgattatcagctccatcggcaccgacggcagggcttcatgcacaaaaataccgatggcgatatagttgataatcggcagaaacagataatccagcaattgcgcccagccgaccagaaacccggtattcccgccgaatattttctggacataggaatacgcagagccggccagcggcagtgtgctggtcattttacaatagctgagtgcggtaaacaggacggctgtcagagtaataatataagcaaccggtaaatgaccttcactgaggacggtaacctgtccgtaagttgtgaagataccaaggggcaccatataggcgagcccgaagaaaaccaacgcgggggtatttaagacgcgtttcatttgcacagtattctgttgcatttttacagcccttcccaatagcctgaaacatgccgcggatatcgcatccgggcacaatatatatttccggccgtcagcggatgacggtcagtctgcatttattttcaataaacctcgcaccttgcgtctgcatcgtgcgcactttactgaaacgtcagtgataaacgggccatcaccacacgctggggtaaatgcaggcggcgtacaatatatgagttatctgtatttggcaacagaagttgaacaggataataataaggataaaccatccttaccggtcgtgcttttccggcttattatcaggcataccgaaaacaacataacctgatatatttttcagtaaattcattgtgatacctgttttaagtaataagccggtgttaccggcaatacattacgtgacataacgtaattcgttatccggctgcaaaagagaataacccgggtatttttgaagcgggagggtgacggataagtctcaggctgctgcttttcatcgccgtaaaacggcgggtaaccgataaataaagataaagtaatcgcgtgtcagaaagaaaatataaaaaataacaacatccccggcggaatatccggggaaataaaagagctcccgggagaagaatattattttctgatgtcaggtgttatttcccggcaggcatgcaatgtttatcgtcacttactgcgacagtaaataattaaaatattaataaattgatttttatgtgatttttttgattttttgacgggcggaagcgtatttcaagcacttcatgttcatatcctgataacaggagtagcctctccgtctgacaataacgggtacagcaatcaggaacgatttctccgcatttttgtcctgttcgtttggtcaaaatgcttttttaccgggatattaacgatgcgttaattctcttaaagtgtgaacgaaatcgtttgcttttgttttttgcggctatagaattcgtcagatttttttggcctgagaaaagcaacaggaggcaattgtgtccggggataaaaattacagtcatgggcctgtgcccatatccgcgcggaaaggcgggctggcattaacctttgtaatgctgggtttgaccttcttttccgccagtatgtggaccggaggtgctctcggtaccggtctcagttttaatgatttcttcctcgcagttcttatcggtaatcttcttcttggtgtctacaccgcttttcttggtttcattggttccaaaaccggcttaacaacccatcttctcgcgcgttactccttcggtattaaaggctcctggctcccttcattcttactcggcggcacacaggtcggttggttcggcgtcggtgtggccatgtttgccattccggtcggcaaagcaacgggctgggatatcaactggctgatcggtatctccggggtgctgatgaccataaccgtgttcttcggtatctctgcgctgaccgtactctcggtgattgcggttccggcgattgccattctcggcagctattcggtttacctcgcggttacaggcatgggcggcatgagcgcactgcgtgatgtgctccctgcacagccgattgattttaatctggcgctcgccatggtggtcggttcgtttgtcagtgccggcacgctgacagcggattttgtccgcttcggccgcaagccgaaaattgcggtgctggtggcgattatcgccttcttcctcggtaattcactgatgtttatcttcggggcggccggggcggcgtctctcggtatggcggatatctctgatgtgatgattgcacagggactgttattaccggcgattatcgttctcggtctgaatatctggaccaccaatgataacgcgctttacgcctccggtctggggtttgccaatatcaccgggctttccagcaaaaccttatctatcgtcaacgggcttatcggcacactgtgcgctctgtggctctacaataattttgtcggctggctgactttcttatccgccgctatcccgccaatcgggggcattattattgccgattacctgatgtaccgtcaccgttatgaaacctttgaccgcagcaaaatgcgcgatgtgaatgtcagcgcactgctggccgtggcggcaggtgtgattgccgggcactggctgccggggattgtgccggtgaacgcagttctcggcggggcgttaagctatgctgtcctcaatccgttacttaaccgtcgtcgtacaaccaacccggagatgacccgtgcttaatcaaaccgtaaaacatatttttaatgcccgtctgccggatcgtgctggcctgtggcgtatcgacatcgataatcagcgcattaccgcgattgtgccgcagccggagggtgaaatactgccggaaagcctggacgccgaaggcggcctggtcaccgcgccgttcgtcgagccgcatattcacctcgataccacccagactgccggggaaccggcgtggaaccagtccggcaccttatttgaagggattgaacgctgggcggaacgcaaagcgctgctgacgcacgatgatgtgaaaacccgcgcccggcagaccctgaaatggcagattgccaacggcatccagcatgtccgcactcacgttgatgtctctgatgccaccctgaccgcgctgaaagcgatgctggaagtgaagcaggaagttgcgccgtgggtggatttgcagattgttgcgtttccgcaggaagggatcatgtcctatccggacggtgaagcactgctggaagaagcactgcgcctgggcgcggatgtggcgggggctatcccgcactttgaatttacccgcgaatacggcgtggaatccctgcacaaaacctttgcgctggcacagaaatatgaccgtctgatcgacgtgcattgtgatgaaatcgatgatgaacagtcccgtttcgtggaaaccgttgccgcgctggcacaccgtgagggaatgggcgcgcgtgttaccgccagccacaccacggcgatgcactcttataacggggcttatacctcccgcctgttccgtctgctgaaaatgtccggcattaactttgtggcgaacccgctggtgaatattcacttacaggggcgtttcgatacctatccgaagcgccgcgggatcacccgtgtcaaagagatgctggcggcggacattaatgtctgcttcggtcacgatgacgtgtttgacccgtggtatccgctgggtaccgccaatatgctccaggtgctgcatatggggctgcatgtctgtcagctgatgggatatggtcagattaatgacgggctgaagctgattacggaatacagtgcgcgtaccctgaacttacaggattacggcgtggcggaaggcaaacgcgccagtctgctgatcctgccggcggaaaacgggtttgatgccgtccgccgtcaggtgccggtgcgttactctgtccgtgacggccgtgtgatagcagaaacacagcctgccgtcacacagatccatctggataaaccggagactatccgttacagccgcacacctcgcactgaggatcaggcttaagattaatggtgcggaactgcatgcgcatcgcatcaaacagcaccacttttccgctgctcacctgcccgtagccggtgagcagtttgatgcactccatcgcctccagggtgccgatggtaccgaccagcggtgccatcacacccgcttccacacaggtcagactgttctccccgaataaccggctcaggcagcggtaacagggttccccctcctgccaggtaaagacagcaatctgtccttccatacgaatagcggcaccggacaccagcgggatcttcagctgatgacacgcccggttcagttgttcgcggacggcgacattatcggtgcagtccagcaccacatggtgagaccggatcagagcggtaagctcatcatcatccagctgtttggtaacggtttcggtatggcaatgcggattgacggctttcagcgcaatggcggcggattctgtttttgccatcccgatacgggcatcggtatgcaggatctgacgctgaagattggagagagatacggtatcaaaatccagcaacgtaagatgccccacgcccgccgccgccagatactgcgctgccgcacacccgagtccgccgaggccggtgatcagcacccgcccggctttcagcgcttcctgaccatcaaaatcaaagccgcgcagcacgatctgccggttataacgcagcgcttcctcatcactgagctcaatatgtccgggttcagtcgccatcagtcattcttcagtaaatggttaaaaaactcgatttcaacggtttcaccggcggcaaccgcaccgcgctcacgctccagcacaataaagcagttggcgaggctgaatgaactgaaaatatgcgagccctggtcgccggtggtttttaccaccatctgaccggactcattcaccccggcaataccgcgctggaaatccagacgaccggaggattttttcagcggcgtagtggtgacggctttaaaccgcattggcggctgccactggctgaaaccggacaggcgggcgatcagcggctgcaccagctcataaaaggtaacggtggtggagaccggattacccggcagaccgcaaaaccaggcgttattcagcttaccgaaagcaaacggcttgcccggtttgatcgccagtttccagaaattaattttgccgatttcatcaagaatctgtttggtgtaatccgcttcgccgacagacacgccgccgctgctgatcaccagatccgcctgtgcatcggctttctcaaaagtggcgcgcagaatatccggattatccgggatcacgccgagatcaattacatcacaaccgagcttttccagcatcagacgaaccgcaaagcggttggtatcataaatctgtccgtcacccagcggctggccgaccgcctgcaattcatcaccggtggagaacaccgccactttcagtttgcgcaccacggacagctccgccagaccgagggaggcaatcagcggcagctgggcggcggccagtttggtgcctgccggtaaaacttcactgtgttgcgcgatatcctcaccagtacggcggatattctgcccggcggtaattccggcggtaaaggtaattccggcatccgacactttcgcttcttcctgcatcaccacggtatccacacccttgggtaccggtgcgccggtcataatacggacacattgtccggccggtaattcacctttgaatggaacacccgccagagcgcgaccggcaaccggcagcggggtttttccgtcccagtcggacaggcgaaacccgtaaccatccattgcggaattatcaaacggcggtacattgataggcgaaataaccggggtggcagtgatccgcccggcggcatccgtcagcgcgattgtttcagtaccggtgatcgcggccggggtcgcgagcagcttatccagtgcttcctgtaaagagattaacgaagaggtgtaactttctgtcggattagccatgatgctgtttcactcccggcgcctgctgggcgcagataaaacggataataaagagaagggcattatggcagacttacagcacaagttgaatgatgtggcacaaaagcgtgagcaacagatctgattccggaagtcattattgcattttaaaggcttcttttggtataacgaagttacaaattattaacatattgcatttcatatgacgacatctcactccgcccgtcagacaacggcgcttcatattgcagtcagtggttttcttgcgctggtggtggccatgggaatagggcgctttgcttttaccccgcaggtgccgctgatgattgacgagtaccagcttgatctgacaactgccggtattgtggctgcctggaactacctcggctatctggcaggatcctttgatgccatgcgggcaaaacgcggtattgagctgcggctgtggaccggtttatggggcgcggtgattatcacactgctgtcagcggtgatttccggggctgtgctgcacagtatcgcgcgcttttttatcggctgggcgagcggctggacactggtgttagcagctgcctggaccaatgacgcactggcaaaacttaaccgtccggcactgagtgtcgcggtttacggcggcaccggtaccggaattctgctgtgcggactggcagctatcggcattcagggcttatcactgaccgcctcgcagggctggtggatctatggtgctgcggcactgctcttcagtctgtatgtcagccgctatctgccgcgcccgggggaactgagcagctcctcctccccgcacagtaaaccgcggatgacaccaaaaatccgccgtttattgtggagctatgcgctggccggattcggctatattctgcctgccacgtttttatcacagatggcggcggcgcgtttccccggcagcctgtttgctcagtttgtctggccggtattcgggatagcggcagtcgccggtatcgtggccgcgattgccacgcggcgttttttcacgccgccgcggcggctggcaatcactctctgggcacaggcagcgggtattctggcggcagaaatcatgcccgggatcagtggtctggcagtcagtgcttttctggtcggcggcggcctgatggctgcggtccagctggcattccagtgcggacgcgaactggcaccggagcacggccgctatatggccggattgctgaccacctggtatgccgtcgggcagctcggcggcccgctggtatcctctgtctccgcgtattttaccggtaaactggaaccggcgctgtgggtggcctttgcagcactgattatcggtggtttgctggttttccgtgaccgcagcgatataaaagaatcattatctcagtgataacagggttattatttattaatcctgttatctttattattcattaaaaataaaaaacggataattaaaaaaacggttttataacttagcctgtttatgctttatttaattttcagggcataaagtcattattctgaaatataacagggcagttattcccgatgagaaagaacaattttcttcagaaggtaatcaatgatctgaaagatatacgattgtggtccatgagtatcagcatgatactgacatctctgacagtaacgcactcctcactgcgcattgtcagaccggacaatgtgatgaccgatgtctttctcacccctgttatttatgtggggtcttatgttctgacaaaaaagatactgtattttatatttgaataattgagaggttaattatgaaagaattaaatcaggaacaattattgttcgtttcaggtgcagggtttatctctgccggaatgatgttcgccggtattgcatttgatatcagtgctgtaatgatctcaaatatcagccggaacaatgaagaaattgtttttgctgatcataaggatatttcccgtcttcgttatgatgttatataacacatccgttatccggcatttttccggcaaatgtttccgtcagcgtcattccggctgatatccgcattattaacagggatttccggtgcaaacttttcatcaccaaaaccacaaaatggattaacaaaacggtgtattgctctaaaatagcagggcggcgggtattgaccggccgacgggtgcaacacagcaccgggagtcacctgaaaaatagtcggagaaggtatgtcatcattaagccgggaagcagaacttgtccacgccgcgctcatcgcacgcgggctggagacaccattgcgggagcagacactgccgccggaaacccgcaaggttcagattgaagcgcatatgacagaaattatgaagctgctcaatctcgacctgagcgacgacagtctggcagataccccgaaacgtatcgcgaagatgtatgtggatgaaattttttcaggactggattatcacaatttcccgaaaatcaccctgattgaaaataaaatgaaagtggatgaaatggtgacggtccgtgatatcacgctgaccagcacctgtgaacaccactttgtcactatcgacggtaaagccaccgttgcttatatcccgaaagacaccgttatcgggttatcgaaaattaaccgcattgtgcagttctttgcccagcgcccgcaggttcaggaacgtctgacacagcaaattctgctggcactgcaaacgctgctcggcaccactaatgtggcggtatccattgacgcggtgcattattgtgtcaaagcgcgcggcatccgtgacgcaaccagtaccaccaccaccacctcactgggcgggttatttaaatccagccagaatacccgccaggaattcctgcgcgcggcccgtcatatttaacggatgaatacttcagtcacatctgcctctgcccgtattgatgtcctcgatatggtgcgggggctggccatcctcggtatttttattctgaacatcggcggattcgcgctgccgtctgcggcctatctgaacccgctgtacaccccggcggcgtccgcaacagatatcgccacctgggcagtattaagtgtgctggtgcaggggaaattcctcggcatgtttgcactgctgttcggtgccactctgatgatgctcagccgttacagccagccctggaatatggcgcggttactggtgcttggagtgatcgggctgctgcataccgctctgctctgggacggggatatcctgctgatgtacagcctgaccggcgttgccgcctgccggatcatccataatgtttcctcccgctggtggctgaagctggtgccggtgctgatcctgaccggattgtttttactgtttttcctgttatcggaaggtggtgagctgaaactgttgtactggcagccgtcgcaggaaatgctggattatgaagtactgatcgccgacaccggtggtattgccggcatgctggacagaatcagtaccatcagcggtatgctgatgatgatggtggttcagtatggctggcagttactggcaatgatgctgctgggcgcaacactgatgaaaaacggctggctgaaaggggcatatccgctgtctcattaccggcggctggcagcgtggctgctgatcccgtcactgctgctgcaggcggttgtgatgtggctggaatacctgaacgactggagtgtcttctggatgggcactgttggttatccgctggcggatattttgcagccggtacagactaccgggcttattgctttgttttatggtttgcagccacagctgaaaccggttgccgcctgtttacagcgggtcgggcgtaccgcactgagcagttatctgctgcaatcggtgtgcggggtgatactgtttgagtacctaggttatttctgtcagtttgatcgcctgacgctgctggcatttgtgccgctgatgtggctgatcaacatcctgttctcaaccctgtggctgcgttatttttctcaggggccggtggagtggttatggcggcaggcagccaataagctggcagcccgctgaaaccggattattgcgcggcgggtgccggttgtgtgttatccgccggtttttccggtgccgcaggtggctccggataaagcacattcagctcttccggtgtcactgccggatatgacggtacattctccggtaacgtttgtggtgccggaatcgattcctgcgggccgaggaaacgcggctcgcggttgagaatatataaatcagccagtgcgcccagccgggcaaccacttcccgcgcacggacagtaaacatattcttcggggaggaaaccgcgtaacagcgcgcctcaatacctttttccatcgcgatatacagcgcccgttcacaatggaagcgctgggtgataatcgtaaagccattggtatcaaagacttttcgtgtccgtaccacagaatccagcgtgcggaatccggcaaaatcgagcacaattttactggccgggatcccggcattcaccagatccttgcgcatcgtgctcggctcattgtaactgtgctgggcattatcgccgctcagcagcagatacttcaccttgccgctgttatatgcattcacggcaccctggatacgataccggtaatattggttaattgtcccgtttttatagtacttagcggtaccgagtaccataccgacttcactcggcggcaggtcattgatattttcatagatataaggcgcggttttccagctaatccagcgatctgccgcaatagccgctgctgctgccagaataatacctgccagcatccacagaatgatccgtttccatatccgggcttttcccattattactgagacctttatcactaattagttaccataaggctaagattacttgagcggggaaaggctggcaagggtgaaaaaaagaataaaacccgcacaagtgcgggttttcagcggcagaataccggttattcgtcagaaagatgtccggcggtaaacacgatattccggatgccagaagttacgttcgatagcttcatcgagtgcaccgtcagaggtcacagtcgcgacaccctggatctgtgcttctttggcaacctgtttggcgatgatacgggagacttttttgatgtcctcgatatccggcagcagtgagccttcgccgttaacaaccatcggtgagcattcagccagcgcgcggcttgctgccatcatcatgccgtcagtcacacgtctggcaccggcggccagcacacccagaccaatccccgggaaaataaaggagttgttgcactgggagataggataggttttatccttataaatcaccggattaaacgggctgccggttgcaaccagtgcatgaccgtctgtccaggcgataatatcttccggacgggcttccacacgggaggtcgggttggacagcggcatgacgaccggacgcgcacagtttttgtgcatttcacggataatctcttccgtaaacagccccggctgaccggaaaccccgataagcacagtcggcttagcgttacggaccacatcttccagtgaaatcgcatcattctgcacatcccagtctgcaataatgtcacttttggtgatcagtttgctctggaaattcagcaggttcggcagtttgtccgtcagcaggccgaatctgtccaccataaagatacgggcacgcgcctgctcttcactcaggccttcagacttcatctgcgcgataatctgctcggcgataccacacccggctgaaccggcacccaggaaggcaacagtctggtctttcagctgtccgcctgcggcacggctggcggcaatcaggctgccgagggtgactgatgcggtaccctggatatcatcattgaagcagcagagctgatcgcggtagcgttccagcagcggcatcgcgtttttctgggcgaaatcttcaaactgtaacagcacatccggccagcggcgcttaaccgcattgataaattcatcaacaaattcatcatattcttcgccggtgatacgcgggtgacgccagcccatatagagcgggtcattcaggcgctgctggttattggtgccgacatccagcacgataggcagggtatacgctgggctgatgccgccgcaggcggtatacagagagagtttaccaatcgggatccccatcccgccgatcccctggtcacccagaccgaggatccgctcaccgtcggttaccacgatgacttttacattctgcttggtggcattctgcagcatgtcatcaatgtaagcgcggttcggataagagataaacagcccgcgcgcacggcggtagctgtccgagaaatgctcacaggccgccccgacagtcggggtgtaaatgatcggcatcatttctttgaggtgagcattgagcaggcggtagaacagcgtttcattcgtatcctgaatgttacgcaggtagatatgtttgtcagtatcgtttttaaaatcagaatactgacgataggcgcgttcagtctgctcttcgatggtctccaccgcttcaggcagcaggccgtggaggttaaaattactgcgctcttcttcggagaaggcgcttcccttattcagcagcggaaattctaacaggatagggcccgcatacgggatatataatgcacgtttactttcgtattccagttccatgtatgactactctttgccaattgacatttttaagacaggacgcactgatcctaagttatctgaaaaatatgtacagtaattgttacgaaattagtgatgccgatgtgtgaaagtgagaggcgggatagatttatatttaataatcacgtaaaggctgatacccggaacagatggggatcagcctcagcgaagacagaattaatagctgaacagggcgatatcctgacaccccagggcgctcagtgtggcagaggtactttcccactgtgacagcatggcgttactgccttccaccagcacggcgcggtgaatgtcatgcaggtcgccgccggccatattcataaagatcagcgcagcctgcaacggcggcagtcccgggttaaaggcggcattttcaatatacgcaccgctgtagatacgtccgcggctgtcctgaagcgccacaccgctgtgagaatgagaatacggcgcatggctgcggttggctgcctcgagcgcttttccgaccaccgcattggtggcgaggaaatgataaccgtgatgcacctggtcaaataaccgggttttaatccccagatccaccgggccgaaagcatgcggcagcagggttttcagcggcatggcagccagttccggtaactgaatcagcaggtctgtgccgctgttcagttcattcataaactgacggcagtggccgcatggtgtgtaattgacggtgactttgcgcaaacctttctcgccgcgcagccaggcgtgggtgatcgcgctctgttctgcatgcactgtttgttgtaacggtacatggcagaattccatattggcaccgaaatagaggttaccgctcagcccgtgtgcaactgcgccgacattaaaccgggacaccggcgtcacggcacaggctgcggccagcggcagcatagccagcgcgagggcatcttcatcagtacctgcggcgttgcagagtgcagtgacctgtttggcagataagtatcccgggaaagtatcagcacaaacaatgtccgtcagcagggtctgtaacggggaagggagcgtgttcagggctgcatgaaagcggttttgcataaaatgacctccattatcaatgagatcattctagcgggtagttatacataatgaacgtgatttttatcacgttcattatgaaacgaatgaaacaaatattgaatttgcgagatggagctcaaattttcaggtcagccgaataatgccagcagtaccgggaagataaacggcgccatcagagaagtaataatcccgcaggtcattaatgccagtgaactgtaagcgccttccacataatcctcttccgcgcagcgggcagtaccgagagcgtgagaggctgtacccattgccaggccgcgtgaggctttggtcgtaacccgcaggcgtctgaacagggtatggccgaaaatcgcgccgaggatcccgacgaaaatcacacatacagcactgattgccgccacgccgccgatagaattggacaccgcgatcgcaatcggggtggtgactgacttaggcaggatagaggccgcaatttccggtgtcgcgcccatcataaaggcaatagcggtgccggtaaccatggcaatcacactcccggcaaagcagatggtgatgatggatttccactgtgcacggatctgatgcagctgttcatacagcggaaacgccagtgccaccaccgcaggttgcagcagatcgttgagaatgcggctgccctcaaaatagtggttgtatgaagttccggtgaatatcagcagcggaatgataatcaagatggatatcagcagcgggtttaataccggcagcttaaatttgatatagatagctctggcgagaaaatagacgccgatggtaagcgggagcgaccaccagatatgcgttaacatttgcgtttctcttgttgttcagtgtgttctgctgcggccaccgcatcggcttcctgctgttccggaaccggaacatggcggcggtgaataaattcagaactcagcgccacagcacacatggcgataaaggtactgacgacacaggcgacgaggatcggcagcaactgggcgctgagggtatcgtaatagttcatcacaccgataccgatcggcagaaataacatcgtcatgtttttcattaataaggtacagccgggctgaacccagtgtgccggaacaatctgcagtgcgagcagcacaaaaagcagcagcatgccaacgatgctgcccgggacggaaaacggcagtaacaccgcgataatattgccggcaaacaggcacagatacaggatcagaaatgcccggagatagcgccagccggtttccgctatctgttttggtttcatgataatgttccttcttggatgaacttattcatcatacaattaactttttatttgtgctataggtcacataaaaaaacctgcaccggagcgcaggtttttttcagtttattgtacagagaagaacttacttcacctgctgacctggttgtgcaccggaatccgggctgagcaggaaaatctcgtttccgcccgggcctgcggccatgaccatgccttcagagatcccgaaacgcattttgcgtggtgcgaggttagcgaccatcactgtcaggcggccttccagcgctttcggatccggatacgcctggcggatgccggagaagacctgacgggtttcgccaccgagatccagtaccagtttcagcagtttgtcagagccgtccacgaaatcggcagacatgatctgtgcaatacgcatatcaactttggcaaaatcatcaaagctgatggtgtccgcaatcggatcatctgccagcgggccgctgaccggtttggctgacatcgctttgatatcctctttggaagcttcaatcatctcttccactttcgccatttcaatacggctgaacagggccttgaagtctgcgatctgatgatccagcagcggtttggctatgccgtccagtgtcagttcctgattcaggaacgcttcactgcgggccgccagttccggcatcaccggtttcaggtaggtcatcagtgcgcggaacaggttgatacccatggtgcagatagcgtgcagctcatcatctttaccttcctgtttcgccaccacccacggtgctttctcatcaatatagcggttggcgacatcagccagcgccatgatttcgcggatagctttgccgaattcccggctggtgtactcttcgctgatggttttttcagcatcgacaaactgctgatataactcaggttcagccagggttgcactcaggcggccgttaaagcgttttttgataaatccggcggtacgggatgccaggttgaccactttgttaacgatgtcactgttaacacgctgaacgaaatcttccaggttgaggtcaatatcatcaatacgtgaagagagtttcgccgcgtagtaataacgcaggctgtctgcattcagatgattcagataggtgcgggcccggataaaggtaccgcgtgatttggacatcttcgcgccgttaaccgtcacatagccgtggacaaacaggttggtcggcttgcgataaccgctgccttccagcatggcaggccagaacaggctgtggaagtacacgatatctttaccgataaagtggtacagatcagcgtcagaatctttcttccagaactcgttaaaatcgagattgccgcgtttgtcacacaggtttttgaatgaccccatgtagccgattggcgcatccagccagacatagaagtatttgcccggtgcatccgggatctcaaagccgaaatacggcgcatcacggctgatatcccactgctgcaggccggaatcaaaccactcctgcattttgttggcgacctgctcctggagcgcgccgctgcgggtccatgcctgtaacatgtcagcgaaagccggcagatcaaagaagtaatgctcactttcgcgcagcaccggtgtggcaccggagaccacggagcgcgggttaatcagctcggtcgggctgtaggtcgcgctgcacacttcgcagttatcgccgtactggtcttccgctttacatttcgggcaggtgcctttcacaaagcggtccggcaggaacatgcctttttccggatcatacagctgggaaatggtccgggtttcaatatgaccgttctttttcagtgccagatagatgttcccggataacacccggttctcctcgctgtgcgtggagtggtagttatcaaagctgatggcgaaatcagcaaaatctttctgatgctcaacgctcatgttggcgatcatctcttcaggagagatcccctgctgttgtgccttgagcataatcggggtgccgtgagcatcgtcggcgcagatgaagtgaacctctttgccgcgcattcgctgaaaacggacccaaatatcagcctggatatgttccagcatatgaccgagatggattgaaccgtttgcatatggcaacgcacaggttaccaaaattttattagcgatctgagacatagagtatttcacttcctcaaataataaagggtctttgatgttaaccgatcccgtccacccctgccagcagtaatccggctttgtgtgtggttttccggacttttttctgccgtgaacatccggcgataaccctgctgattgcaggggatttgttttgtgcgggtttgcgcggaatgactaaattaatcagttggcttctgctatcattgaagccgatagttacaggcaataaaaacgataaatttaaggagccgggatgaatgcgaaatcccccggggagatgaaccctgaattgctgaacgaccaggtcgcgcaggtactggcgacatttgagcatccgacactcaaacgcaacctgattgccatcaaagcgctgaatcactgcgcaatgctggatgatgtgctgcatgttgagctggtgatgccgtttgtctggaagcgcccgtttgaagcactgattgaagcaaaaaccaaagaattacgcaaagtgaccggtgcggcggcggtggactggaaactgcgtcatgatatcgcgacactgcgccgggccaatgatctgccgggcattaacggtgtccgcaatattctggcggtcagctccggcaaaggcggtgtgggtaaatccagtaccgcggttaaccttgcgctggcactggcggcggaaggggcgaaagtcggtatcctcgatgcggatatttacggcccgtccatcccgaacatgctgggtaccaccaaagagcgcccgacctcaccggacggccagcatatggccccgattatggcttacggcctggcctctaactctatcggctatctggtgacagatgataacgccatggtctggcgcggcccgatggccagtaaagccctgatgcagatgttacaggataccctgtggccggatctggactatctggtcatcgatatgccgccgggcaccggtgatatccagctgaccctctcacaaaacatccctgtcaccggtgcggtggtggtaaccacaccgcaggatatcgcgctggtggatgccatgaaaggtatcgtcatgttcaagaaagtgaacgtgccggttctggggattgtggagaacatgagtgcgcacatctgcagtaactgcggccatgtcgagccgattttcggcaccggcggggcggagaaactggcggaacgctatcacaccaaactgctgggacaggtgccgctgcatatctcgctgcgtgaagacctcgatcgcggccagccgacggtgatgcgtgacccggatggcgagtttgcggatatctaccgtgagatcgccgtaaatgtgacggcagaaatgttctgggaaggggataaaatcccgacagagatcgctttccgcgcagtttaagcggaatttatttctgctccggcacgtccggaaagtcaaaaagaccagtgcagtgatgtgctggtctttttttcgggtggccataagagcggttaccccgaaataatgaggccggatgcccgattatgctggaatctcacgccgttactccctataattcagcgccgggcggacacgttttgttactcacggccggataagcattaaaagaggccgcagcagaccgtttcggtttttttctctcctattttcaaaccgggttatttcaattatggctgacacagcacagcagcagtgcactatcatcggcatcaccggcgcatccgcgtcaggaaaaagtctgattgccaacacgctttatcacgagttacgtgctcaggtgggcgatcacaatatcggtgtgattccggaagactgctactataaagatcagagcgatgtgccgatggaagagcgcatcaaggtcaactatgaccatccgggctctatggatcacgaattgctgttacagcatctgaaaacactgaaatccggtaagtcgattcagttaccgcaatatgattacgccgagcatacccgcaaaccggaatcggttctgttcagcccgaaacgggtgattattcttgagggtatcctgctgctgacagacaaacgtctgcgcgagcagatggacttctccattttcgtcgacaccccgctggatatctgcctgatgcgccgcatccgccgtgatgtgaatgagcgcggacgcacactggactcggtgattgcacagtacaataaaaccgtccgtccgatgtacctgcaatttattgaaccaacaaaacaatatgctgatatcatagtgccgcggggcggtaaaaaccgcgtggcgattgatattctgaaagccaaaatcagtcagttctgcgagtaagccgccaacaacgattaacccgcgtttatccgccggtgataaacgctgagttttataaggatgataccatgcgactttgtgaccgtgacattattcagtggcttgatgatggcagactgaccatctccccgcgtccgccggttgagcggatcaacggggcgaccgcagatgtccgcctcgggcatcagttccgggttttccggggccataccgccgcgtatattgatctcagcggcccgaaagaagaagtgaatgcggcgctggaaaatgtcatgagtgatgaaatcaccctgactgaagatgaagtgttctacctgcatccgggtgaactggcactggcagtgacactggaatctgtcacactgccggataacctggtcggctggctggacgggcgttcatcactggcacgcctcgggctgatggtccacgtgaccgcacaccggatcgatccgggctggcacgggcaaatcgtactggaattttacaactcaggtaagttacccttggcactgcggccgggaatggtgatcggtgccctgagttttgagccgttatccggctccgctgaccggccgtataaccgccgcagcgatgcaaaatacaaaaatcagcagggagctgtgggcagccgtatcagcgaagattaaacggcggacagtactgtccgccagcgggttcaacagagaatgggaaaggaacagggattatgaaacgatttttcaccacgctgattattctgcttgtcgtgatagcggcgggcctcgcggccttaatcctgctggtgaacccgaatgatttccgcgactatatcgttaacaaggtgaaggaagacaccggttacgagctggtgatgaaagatgatatgcgctggcatgtctggccgaaactgagcatcatcaccggtaaaatgtccctgactgcccccgatgccgccgaaccggtggtaactgccgaaaatatgcgcctcgacgttgaactctggccgctgctgtcccatcagttatcggttcgtgaagtgatgcttgacggcgcactgctgaaaatcctgcctgaaaccgaatcaaaagagaagaaaagcgctcctgttgcgccgggtaatcagaaagcccgcccggtgcctgtcgaacaggaaaacaaatggtcgtttgatgttgaccgcatccgtatcgccaacagcctgctggtctggcagacagaagacggttcgcagatcaacatgcgcgatattaacttctctcttgagcgtaatacccctgaacgctatgtgatagcgctgaacagtaatattctgcgcaatcagcaggagctctctttcagcctgagttctgatattgacctctcccagtacccggtgcaggtcagcggcaatattaaccgcctgaattaccgtctgtccggtgccggtctgtatgccaacggcatcaacggcaacggtacgaccacctatacctggcacgaagcggtcggccaggcaccgcagtccctgatcctggaaaatctgaaactgagcgctaacgaaagccagctcagtggcacagtggaagcggcactcggtgaaaccccgcgttatgatatccaactgacctcctcaaaactgaatctggataatctgctcggttatgagcgtgccgtacatgcagaaaacggggaaaaaaccccggttgccaccaaaccggcggtggttaccaccggcagtgatgcggataaatatgatctgacctttatgaaccacttcaatgccactctggcgctgaatgtggattccctgatttaccagggaatggaaatcggccagctgacggtgaaagcagagaaccggggcagcatcacggaaatctccaaaatgaccggcaacgtgttcggcggccgtttctctctgccgatgacgatttattccgaaaaagttccggcacagctgcgtatcaaaccgctgttacagaatattgatgtcaaaccgttgctggcggcgtttaaaatgccggaaaaattcaccggacgcctgagttttgacggcgatctgcgtggtaccggttatgatcaggacgcggtcttaaacaactggcgcggtgacgtggcactgaccatcactgatgttaagctgctcggcctgaatattccgtatcttatccagcagtcgctctcccaggcgacagataaagtggcgcagccggaatcgatggatgctatgaccgaagcgaaaaaactggaagctatcggtaccctgaataacggtgaagtaaaaatcagtaaaattctggcagtatccgatgcctttaatatcaccggcagcggccggacgaacctggtgaaacagaatatggatgtgaacctgggggttcagatcttaaaaggctgggggaaaaccaatgacctggtgacctggctgcagtctgtccgtattccggtggtgctgttcggtaactgggataatattcagtataagttcgaagtggaaaacctgttgcgtaatcagatacagcaacgggtaaaacaggcagccggagagttgctgaatgaaaaaaccggaaaggatctcaaagctgtggaatccttgcttaaccggttataaattcgcggacgatttatacaaacagagcagtgacgataatttatattgtcactgcttttttaatgccggaggccggaacacttaaatgatacgggtaataactaaggttcattgacgcatatcatttaatctgttcccggttttcggcagagtgcattaatcatttttataaataaaaataccagacaggagcagaaatgttagatcttcttattggtgctgtcgtcgccgtcggcgtcgggcgctatattattaaagggtattcagccacaggggtgctgatggtcgggggcttactgcttctgatcatcagtgtcatcatggggaaaaacatcctgccgtccgccgccacctccaccggctggggaccgacaaacattattgagtatgtgaagtacctgctgatgaaccgcggcggcgacctcggtatgatgatcatggtactgtgcggctttgcggcttatatgactcatatcggtgccaacgacgtggtcatcaaaatggtctccaaaccgttacaggtcgtgaactctccgtacctgctgatgatcgtggcctactttattgcctgtctgatgtctctggcggtttcctccgccaccggtctcggtgtgttactgatggcaaccctgttcccggtgatggtgaacgtggggatcagccgtggtgcggcggcggctatctgtgcctctccggcggcaattatcctggcaccgacctccggcgatgtggtaattgcggcagaagcatctcagatcccgctgaaagagtttgcattcagcctgactctgccgatttctatcgtggcgattgtatctatggcgattgctcactatttctggcagcgtttcctcgatcgcaaagaagatatcaaatctgagatcctggacgtcaaagaaatcaccaccaatgcgccgaaattttatgccattctgccgtttatgccgatcatcggcgtactgctgtttgatggtaagccgttcagcatcggtttcctgagccatatcgtgctgcctgaattacacatcatcacgattattgtcggctgtattattttgtctgccattattgaattcgtccgtggttttgacggcaaaaaagtctatgccgggctggatgtctgctaccgtggtatggcggatgcctttgccaccgtggttatgctgctggtggcggccggtgtgttcgctcagggcctgagcaccgtcggctttatctccggtctgatcagcctggcgcagtctttcggttccggcgcgattatcatgatgattgctctggtgattattaccatgctggcggcgatgactaccggttccggtaatgcgccgttctatgcgtttgtggagctgatcccgcgcctggcacagcagatgggtatcaacccggcgtacctggtgatcccgatgttacaggcatccaacctcggccgtaccatgtcaccggtttccggtgtggtggtggcggttgccggtatggcgaaaatttcaccgtttgaagtggtgaaacggacatccgttccggtgcttgtcggcctgctggtggtgattgtcgccactgagttcctggtgccggtaacactgtaaaacgacacgggccgcagcggttatccgctgcggcttttttgtatcagtacggaaagtgtgaggttggctttggataagatttttaccggtgtggtgcagggcacggcgctgattctaaaaattgaagaaaacaatgatcatctgattcatattgtgcagtttccggaggaattattaacggggctggcgattggtgattccgtatcgtataacggctgctgcctgactgtcgcagcgattgataacagccatgtcgggttttatcttttcaccgataccctgctgaaaaccgcgctcgggcggctggctgcgggtgataaggtcaatatcgaaagagtggcggcataatgatataaaaaaaccccgtatctgacggggtttttgttctgtgaggggcgttaattacacacggttaaaggcaagaatacggactgaacgcaggtcagcctgagactcgtcggcaattttctgagtagcttgttctaatgcatcccggggtgacacaccggcttcggtttctgtgatctgatgtccctgtaaagtgtctccgttacgggcacgcactttgtacgatacaaaccaataatccatatcatcacctgcttctgtcattaatcgtttaatcaccatagcggtttacgtcactgattaatgtgaccggaatcaatcatttaattgtttttctgtccggacggcagcgcatcagcctgagccgcgatatcttccagaatcgtttcccgttcaaagagcaattgttgttcacggcttgaagagcaggtgaacagaagcaggataagcagaccggttgcggcggcggaaatcagccatgaacggcgatccattctgcggttacggacaccggaggcagcggaatacagccatcccagaacggcaccgcaaatcagcccgctgaaatgggccacattatccgtcaccggctcctcatcatccggcactgcactgagtaccgacagtacgatcaggacaatcatggtgatcagcagatttttataacgcaggctgtccgccaccgacacggacggatctttccgggcccggataagatacatcacggtggtaccggcaagccccataatggcgccggaggccccgacaccgacagtcaccggaatgccggacagcggagacatatcgttctgagtggcctgccagagcgcgctggcaaaggatgcggaaataccggtaaacagatagataaacagcattctcattttgccggtcagcgcttcacagttaatgccgaacaccagaagggcgatgagattgacgcccagatgaaacggatcggaatgaagcaggatgctggttatatagcgccaccagtcgccggtcagtgataactgatacacactgccgcccgccagcagcatattgtagacctggtctgccagcggcgaagcgtaattcacctgccagatataaacgccggtattgagcagggcaaggaaaaaggtgagcagcatggctgagagccggtactccggccgtgaaggcagaaccacatcaccccagggatttatgttattcattattattttgcggataatttgatttgattaagtctatttgaggggcaggcaggctgtaaacaggaaaaagccgggataattatcccagctctgacaaatgcggatagcggcaggaattaattattttccagccattcggtgtggaacacgccgtctttatcagtacgtttataagtatgtgcaccgaaatagtcacgctgtgcctggatcaggttcgccggcagtaccgcgctgcggtagctgtcataataggcgatagcggcagagaaggtcggtgtcgggataccgtgctgaacaccgtagcagaccacatcacgcagtgcctgctgatattcatcggcaatctgtgtgaagtaaggggccagcagcaggttagccagtgccgggttttccgcatatgcgtcagtgattttctgcaggaactgggcacggatgatacaaccggcgcggaagattttcgcgatttcgccgtagttcagatcccagttgtactcatcagaggcaacgcgcagctgtgagaagccctgagcataagagacaattttacccagatacagggcgcggcggactttttcaataaactctgctttatcaccgctgaacacagctgctttcggtcctttcagtactttggaagccgcaacgcgctggtctttcagaaacgagatataacgggcaaatacggattcggtgatcagtgtcagcggcacgccgaggtcgagcgcgctctggctggtccatttaccggtacctttgttagcggcttcatcgaggatcacatccaccagatagttgccgtcttcatctttcttgcggaagatatcttttgtgatatcaatcaggtagctgctcagttcgccgttgttccactcactgaagacggaagccagttcatcattgctgatgccgagggcatttttcaggacggagtaagcttccgcaatcagctgcatatcgccgtattcgataccgttgtgaaccattttgacgtaatgaccggcaccgtcagcaccgatataggtcacacacggctcgccttcggcctgtgccgcgatctgtttcaggatcggggcaaccagttcgtaagcttctttttgtccgcccggcataatggacggccctttcagtgcgccttcctcaccaccggaaacgccggtgccgataaagttaaagccctgtgcggacagctctttgttacggcggatggtgtcctgaaagaaggtgttaccgccgtcgatcagaatgtcgcctttatcgagatgcggagtgagggacgcgatggttttgtcggtggcttcaccggctttgaccatcagcaggatacggcggggtttttccagggagtcaacaaactcttcaatgctgtagctgggaaccagtttttttcccgggttttcagcaatcacttcatcggttttatctgaagagcggttaaaaacagaaacagaataaccgcggctttcaatattcagtgcgaggttacggcccataacggccataccgacaacaccaatttgttgtttggacatgaagactccttcaggaattgacccgtgactaacgacgatttcgttagctgactgttaatttcgtcacagtttaacgcatgtaaaggctgcgtggtagcgattgatgcaaacggtctcgtcatagcgcacaacaggaacagcggcaaagtacggaattttttattgctatttggccgcacaatccgcattattccggatgcagcataagctgtgtgaataaaaggtaaaactaaccgtatggaatggatcgctgatccgtcgatttgggccggcctggccacattaatcgtactcgaaattgttcttggtattgataaccttgttttcattgccattcttgccgataaacttcctcctgcactgcgtgacaaagcccgtataaccggtctgctgtgtgcgctggtcatgcgtattattctgctgttcagcctctcctggcttatcacgctgaccaaaccgatgtttacgatgttcggccatccgttcagtgcgcgtgacttaattatgctgatcgggggtctgttcctgctgttcaaagccacaatggagctgaacgaacggctggaaggcggtgagcataacgacgggcagcagcggaaaacctcaaaattctgggcggtggtggcacagattattgtgctggacgccgtcttctcgctggactccgtgatcacggcagtcgggatggtggaccacatcggtgtgatggtcacggcggtgattattgccatgctgctgatgatctggggcagccgtccgctgacccgctttgtcaatgagcacccgaccattgttatcctgtgtctcagcttcctgctgatgatcggtttcagcctggtggcggaagggttcggctatcacattccgaaaggttacctctacgcggcgatcggtttctccatcatgattgagatgctcaaccaggtggcaatgtttaaccgccgtaaattcctgcgcgggagaaactctctgcgccagcgcacggcggaagcggtactgcgtattctgagcggcaagcgcgaatcttcagagctggataaccgcacggcggatctgatttcggataatcaggaaatttttgacccggaagagcggcagatgattgtccgcgtgctggggctgtcgcagcgtaacgtcaacagtattatgacctcgcgtcatgatgtggagatgctgcggattgatgcgaccagtgatgaaattgcggcactgctgattaaaaatccgcacacccgcgtggtgatcaaaggctcggcggatgatgatgaactgctgggtgtggtgcatgtgattgacctgctgcatcagcgtttacaacaggatacgctggatctgcatgcgctgatcaaacagccgctggtcttccctgaacagctgtcattactgaaagcgctggagcagttccgtcaggcgcagacacactttgcctttgtggccgatgagttcgggtatgtcgaaggggtggtgacactgacagatgtgatggaaaccattgccggtaatctgccggtcagcggtgttgagaatgatgcccgccatgacattcagtttacggatgataacagctggatcaccaacggctttatgccgctggaggatttaatcaactatattccgctgacactcgatgaaaaacgcgagtatgaaacggtggccggtctgctgatggagcatttgcagcgtctgccgaaagtcggtgagcagattaacattgacggctgcctgtttgagccgctggaaattcagaatcaccgtattaaccgtgtgaaaatcacactgccggagaatccggaagaccgtgatgattactaagggttaaaacaataacgccgccggagacggcggcgttattctcatttctgtgcaggttattcaaccggggcacattcaaaatcactgaagattttctggctgtttttggcgcggggtttaaattttccggctggtttgttagttacaggtaataatcacgcgatcaccggatccgttactgatgcagtattcagtaaatccccgggcagcgcccattgaccaggtatcagggactgcataagcagagcaggcggtaatcacaccggccagtagtattttttcatttaagatatctgtcagggtggccggtaacggggtattcagattttgacacacaataattttacaattactgatttatctgctttatttttatctttaattgtataccctgcaattcctgaattatggttatgtatcagatttcctgagggataaaaaaccgcctatgtctgttgtgacactgatccttgtttttttgctggctgtgattgccagtgtgtttatctcccgtctgctgggggacaaaattccgctgccttttattcagattgccattggcgcggggttatcactcttcggttttgatgtggcgtttgagccgcatctgttcctgttcctttttatcccgcctctgctgtttcttgacggctggcgtattccgaaggaagcgctgttcagtgatatcaaaccgattttctcgctggccatcggtctggtgttcttcacggttgtcggcatggggctgtttatccactggctgatcccggcggtttccctggcggttgcttttgcattagcggcgatcctgtcaccgacagacccggtgtctgtggcggcaatgaccgtcaatgcgccgctgccgtcccgtatggcccatattctggaaggggaatccctctttaatgatgccagcggcctggtgtgcttcagttttgctgtaacagctgcactgaccgggacattctctctgccgtcagctgccgggaagtttatggtggtagcgctgggcggaattatggtcggtttactgattgccatgtttatcgggaaagtgaaccagttcctggtgcagcgtaccggggaagacccggcgattcagattatgatcagcctgctgatcccgtttgtctcttatctggcggcagagcacctgggtgtgtccggcattctggccgcagtggcagccggtatcgccatgcactatgagcgtattgtcggccgtatgcagtctgccacccgcatgcagagcaaggcggtctgggacaccgtgcaggtcgcgctgaacggaatgatctttattctgctgggtgaacagttaccgggtatgtggcgctcagtgccgcaggtggcggcagatgccggagcttccgcaccgtgggtactgctgctgtacgtggtgattatcacctttggcctggcggtgctgcgttttgcctgggtatggattgccatgacactgacggttttccgccagcgccgcaaaggtaagcagtctgatatgccgcatctgcgcctgatggcgattatggcaactgccggtgtgcgcggggcgattaccctcgccggtatcctgacactgccgatgctgatgaatgacggttcaccgtttccgcaccgggatctggctatctttctcgctatgggggtgattctgttttcactggtgattgcggcggttgcactgccggtgctgaccagagggctgaatacggacttaccgcatgataatgaagagctgaatgcccgtttcaccctgaatgaagccgcaatgagcaatctgcgtgtgcagatggcggagccgctggaagatattgatgaaatgacactgcgcacagaagtggggactcatttgctggagatctacggccgtcatcttgacagtaacagtgatgaccagactgccggatttgactggcataatgtgatccgcatggaacggcggatgtcactgacagcgcttcaggcggagcgggatgccctcaaacagctgcgtaagagtaagaatatcagtgagcacacttacacccggctggtgcaggaactggatctgaaagaagaggcgctgaaactggcgctgcactgacagtaacagaataaaaatcaaagacccgcagtgcgggtctttttttacatcacaacactgctgcgggtatgtgcctgcagaacccgtgaggcggtctgtgtcatggtatcgttgatttcatcgagccagtgatgaacctgctcagcggataactgcagtgacgggcaatcccggtccttctggttgttctcttccagtaacagaaccagttcggtatccagcagagactggatcatatctatccacaggccgatttgctggttcagcggctttccggccggagaggtgatgcagtagcggttgagccgttcagcggcggtatactgaaaatcatcccgcagtgccatccgctctgccagtgtggcggtttcaggcgcgggcagcggagtaccgagacaggtaaactcataactgtcttcccgggtaaacagactgtcattcagccggatctgcttttcctcataatgcatcaggacttcgcgcagcagggcgctgaccgcaaaaaagtggtcggttttatgaaactggctgccgttgagatacggcgcactcaactgctgccgcagggattgctcatcttcctccggcgaggagacaaaacgcctgcgggatttctgtgttttgaaccagcggcgccagcggtggcgcgacagatacagcagcaggctgagtaacagcagataataaagcgagtctaaaagttcgtcctgcataagcgccttcccaagcaaaaatcaaagttcacggcggacaaacgatactgtttcaggatcggcaatccgctgatagtcctttgtattcagaataatggagcactccaggctgccggcattaaaggccagctcactgaaacgttcaaataacatcggatcggcaacgagacggagatcagggtgaaagctgaacggcgggatagcaccgaacacacactgtgtcagttcagctgtttctgcagggctggcgagagaggcgcgggtgccgccggttttttttgccagtgcctgtaaatccgcctgctgatcagaaggcagaatcgcaagaacatactgacgtacaccgtttcccttgatatgacaaaccagtgctttggcaccctgaccgtggtgtgtgccgcgcactctggcgacttcttcggttttcccggcggaggcatgatgtaccacacggtagcgggcattatgttcatccagccgggcggtcagtttctcaaaaatcggggtcatatcactcatagtctctgcatttgttgccaatatcctgcctattatagaaggttacggcaacaaaaacagcggacaaaaaaggatttcccccgctttcggattaacggtgacgggaacgcagtttttcaataacagcggccagatccagatcggcatcctggagcagtaccagcaggtgatagagcagatccgcggattctgaggtcagttccgccttatcgcggacagtggcggccagtgcggtttccacgccttcctcgcccactttctgggcaatccgtttggtcccggcggcatagagttgtgctgtgtaagagctgtccggatccgccgttttgcgggattttataacagactccagttcatacaggaaaccctgggctgtctgtgcgggcgcaaaacagctgttggtaccctgatgacaggtcgggccgatcggggtgaccagcgcgagcagcgtgtcgttatcacaatctttaaacaggtcttccagattaaggaaatgcccggacgattcccctttggtccacaaccgctgtttggtgcgggaataaaacgtcacgcgtttttcgctgatcgttttgtccagtgcgtcgcggttcatgtagcccagcatcagcacatcaccggagacggcgtgctgcacaataaccggcagcagatcgccggttttctgccagtccagttgtgcgatttcctgttccgtgagcatcgtgtgttactcctgtattctgacaacgatcccgtcgcgggcaagtccgcgtttcaggtcgccgatattaataatttgtttgtggaagacagaggcggcaagcgcgccgtcaacaccggcctgtaaaaacgcatcacggaagtgatccggatgaccggcaccacccgaggcaatcagcggcacctgacacacttcacgcacttttttcagctgctccaggtcgtagccgttgcgtacaccatcctggttcatcatattgaggacgatctccccggcaccgcgctgctgcacttcctgtacccagtcgagggtgttacgggaagtggcgatggtgcgtttttcatcaccggtaaactgatagacctgatagtttccgctttccgcatcgtgccaggtatcgatcccgacgacaatgcactgcacgccgaagcggtcagccagccgggtgatgagagtcgggtcactcagcgccggggagttcacggagattttatccgccccgaaactgaggatcgcggcagcatcttcggtactgcggatcccgcctgccacacagaacggaatatcaatcacttctgctactttggctacccagcttttatccaccacgcgaccatcagaggaggcggtgatatcatagaataccagctcatccgcgccttcttcggcataacggcgggcgagggggacaatgtcgccgatgatttcgtgattacggaactgaacccctttgaccacctgtccgtcacggacgtccaggcagggaattatgcgttttgccagcatgcgatagcctccggtaatgtcattttgccgtcgagcagcgcccggccgacgatcacgcccgccacaccggtggcaggcagcggggcgatatcattcagcccgccgataccgccggaggcctggaaggcaatctccgggaacgcggtacagatttcctgataaagcgccacattggagccggccagggtgccgtctttcgagatatcggtacataatacgtggcgcagcccggcagaggcgaaaccgcggattacgtcttcgatggtctgctctgaatcttcctgccagccgctgaccgcaacccgttttttaccgtctgcgccgatgcgcacatccagcgccagcacgatgcgttctgccccccaacgggcaaaccagcgttttacttcttccggggatttgatcgccgtggagccgaccaccacgcgggcggcaccggcatcaagcagggcggcaacatcctcttcagtacggatcccgccgccgatctgtaccggcacgcgcacacccgccagcagtgttttcagcaacgggatctggcgcttcgccgggtctttggcaccggttaaatccacgaggtgcagcagttgcgccccttcgcgctcataagcttgtaaacggctgagcggatccgcgccgtaatcgcgctgttttgcataatcgccctggtgaaggcgcactacctgtccgtcaattaaatccagtgcgggaatgatcatgacgatttcatctccagaaaatttttaatcagagtaatgccggttttacctgaacgttccgggtggaactgcacgccgtaaaaattatcgcggcagagaacactgctgaaagcctcaccgtacgtggtggtggctgccgtggcgtcgctgaccggacaggagtaactgtgaacaaagtaaaaatagctctgcggcgcgatatcacggaacagcggcagatcggcggtaaattcaacagtattccagcccatgtgcggcaccggcagaccatccggcgtcattttctgtacgggggtatcaatcagaccgagcagatcgatatttccctcttcgctggtggtgccgagcagctgcatgccgaggcaaatccccagcaccggctgtgtcagggaacggatggtgctcaccaggccgcgcgctgtcagattttccattgccgcacccgccgtcccgacccccggcagaaacactttatctgcctgacggataagatcagggtcggcggtgaccagcggctgataacccagacgctcaaccgcgtagcggacggaggcgatattggcacagccggtatcggtgatcacgatgcgcatcacaacaccccttttgaactcggcagaacattaccttccacacggatggcctggcgcagtgtccgtccgaacactttaaacaggctttcagctctgtggtgatcgttcttccctttggttttcaggtgtaacgtgcagcccatagtgtaggagagtgagcggaagaagtgctcaatcatctcagtgctcaggtcgccgacacgctgatatttaaaatcggctttgtattccaggtgcggacggccggagatatccagagcgcagcgggcaagacactcatccatcggcagggtaaagccgaaacgggtgataccgcgcttatcgccgagtgccagtttcagggcttcgcccagcgccagtccggtatcttccacggtgtggtgatcatcaatcaccaggtcgccgctgacctgaatattgaggcggaaaccgccgtgggtggcaatctgatccagcatgtgatcgaaaaagccgacaccggtgcggatggtgctgccgccttcgcggtcgagccatacttcggtgagaatatcggtctctttggttctgcgctccacgcggctgtaacggtcacggcgggtcagctgctctgcgatactgttccagtcagtgtccggctggccgtaacgcaggccggtaatgcccatgttttccgcgagctgaatgtcagtttcacgatcgccgatcacatagctgtttttcgcgtcaataacgcccggcagcaggtatttttccaccagcgtgattttcggtttgcggcagttgcagttatccgccggtttgtgcggacaaatcagcacctcatcaaaggtaatgccctgagaggtgaaaatctgcatcatcagctggtgcggtgcctcgaaatccgcctgcgggaaactgtctgtacccagtccgtcctggttggtgaccatcacaaagcggtatccggcctctttcagcttcagcagcgcggggatcacatccggctcaaaagccagtttgtctaatctgtccacctgaaaatccaccggtggttcggtgatcagagtgccgtcgcggtcaataaataaaacgttctgtgtcatggtatccgttgtcctcagattatggcatttcaagcgcggcgatagcggcaatcacccgcaggcattccgcccgggtgccgacagtaatgcgcagacagttttccagcccgcgttgtttgcgctggtcacgtaaaataattccctcatcccacagactgcggaagacccgctccgcatcacggaaacgcaccagaatgtagttggtttcgctcgggaaaacggtttccgtcagcggcagtttgcccagctcatcacacagcatctgccggttgctgcggatttcgctgacgcgtgcctgcatgacggcaatgccctccggcagcagcgcttcggcggcaatggcggccaccggggatgacagcggatacggcgcgatcactttcatcagcacattaataatctccgcagaggccagtgtgaagccgcagcgcagtccggcgagagcaaatgctttggagagcgtgcgcaggatcaccaggttcgggtattctttcagccacgatgccacactgaactccgggcagaactcgatataggcctcatcgaccacaatcagtgcgcggttatcaacgatatcaaacagataacgcagatcctgttcgcggatcgggttgccggtcgggttgttcgggtggcagacatacagcactttgacgttatcaaggctggccgcgatactgtccagatccaattgccagccatccagtgccggcaccactttctgtgcgacaccaaaggtttccgcactgacgctgtacataccgtatgtcggcgggcagaacagcacggcatcttttcccggttcgcagaaggcacggatcagtaattcaatgctttcatctgcgccgcgccccgcgataacctgctccggactgacaccggcgtaagccgcatagcggttgatcacgttcgcaggctgacactccggatagcggttcaggttgcgatccgtaaaggtgaaatccggtgcctgcggatattcgttggcgttcagccagacatccccgttaccgccgagacggcgtgccgactgatacggcgtcagtaactgcacgttttcgcgggccagtgccatcgcgctgaatggtttgttcatcggttgttttcctccgctttcagggcattcatccgcagtgtcacggcatttttgtgcgcggtgagcagttctgccgccgccagggtttcaatcgcgtctgccagaccggataacccggccggggtcagcttctgcacggtcatccgtttcataaaatccgccagtccgaggctggaataggtcgaggtataaccgtaagtcggcagaacatggttggtgccggaggcataatcacccgccgattccggcgaccagtcaccgaggaacacggaaccggcactgttgatagcaggcagcagggcatcagggtcgcgggtctggataattaagtgctccggaccgtactgattgctgatcgccacacaggtgtccaggtcgcgggcaataataatgcggctggcggacagggcctgacgggcaatctctttgcgtgataataattccagttgtgaattggtttccgctaccacgcgctgtgccattgcttcatccggggtgaccagcaccacctgagaatcagggccgtgttcggcctgggagagcaggtctgctgcgacaaaggccgggttggcaccgctgtcggcgatcaccagtacttcagaaggcccggcaggcatatcaatggctgcaccgccgatagtctggctgacctgacgtttcgcttcggtcacataggcgttgcccggcccgaaaattttgtcggtggcgggaatggtttctgtgccgaatgccatcgcggcaattgcctgggcaccgcccacctgataaatggtctccacaccgcaaagttgcgcagcatataaaatttcatcggccaccggcggcggcgagcagaggatgatccggcggcaaccggcgatttttgccgggacagccagcatcaggacagtggaaatcagcggcgcgctgccgcccgggatatacagcccgacactgtccaccggacgggtcaccagctggcagctgacgccgggctgggtttccacatcaatcacatccgggatctgcgcctcgtgaaagcgggtgatattagctttcgcagtcgccatggcggatttcagcgaatccggcagtcggtcagcggcggcggcaatctccgcagcactgatttgcagttctgtcacctgtgttttgtcaaagcgggcactcagcgcgcgcagggcatcatcgccgttttcccgcacatcgcggatgatgtcactgacaacgcggctgatatcaccggatgccgccatcgccgggcgcatcagggcatccgcctgctgttgtgcatcaaggttttcccagcggatcaaggtattaaaggtcattgcggtcattgtcatcactccatcattttttcaatcggcagaaccagaatggagctgcaaccgagggctttcagtttctccatggtttcccagaacagggtttcgctgctgaccatgtgcatcgccaccagatccggctcaccggccagcggcagcagggtcggacgctctgcgcccggcagcagggcgatcacttcgtccagacgttctgacggggcgtgcatcatgatgtatttggattcacgtgcctggataacaccctggatacgggtcatcattctgtcgataagctgctgtttagcgggcggcatgtcaccgtcgcgctgaatcaggcaggctttggagcggtaaatcacttccacttcgcgcagaccgttggcttccagcgtggcaccggtggagaccaggtcacagatggcatcggccagaccggcgcgcggtgccacttccaccgagccgtttagcagacaggatttaaagcggatacctttctgatcaagataacgtttgagcaggaacgggtaggaggttgcgatacggctgtcctgaagacattccgcgccgctgtagctgaaatccaccggggcggccagcgaaaggcggcaggtaccgaaatccaggcggcgcagcgtgaagtaacgcgggttttgtccctgtgcctgacggcttaataactcttcttccagtacgttttcgccgatgataccgaggtcaaccacgccgtccatcaccagaccgggaatatcgtcatcacggacccgcaggatatcaatcggcatattctctgcgtaagcaatcaggcgctgctgttgtaagttgatttttatgccgcagcgcgcgagcaactcgcgggagtcttcacttaagcgacctgatttctgaatggctatccgtaagcgcgttttatctaacattttgattatcctttgattttataattctttaggtataaaaaaacccccggaaaaaagattcttccgggggttctctcttagcacgcatgccaccggaagctctgaacgtcttccggcaccaatcgcctgaaagactagtcagggtgatggtggtggtgatggctgaactggatgcgtgtcatgataatctctcgtcgtttatctgcttgttgctatcacggataatgttgtcattatggtgataacgatgtttataaattgcttgtctttcaacctatagaactcacccggactttgcaaccccttttttgcaaagaaaacagaaattaagataatttactgaaattaaagaaaaataagccacagagaggtcatgcacgatgaaaacagtttccatcgcggggctgggctggctgggaatgccgctggcactgcatcttgcggatatcggtatccgtgtcaaaggtaccaaaaccacgccggacggcacagaggcggcgaggatgtgcggtattgagtgttatatgctgaatctgacaccagagccggaatgtaacgctgatgatctggatgcttttttgcagacagatattctggtgatcacactaccggcatcaagaacggcgggcggtggttacctgtatgtgaaggcggtgcagaatctggtggatctggcggcggcgcgcggtgtgtcgcgggtgatttttaccggttcaacagcggtttacggtaatcagaccggtaagctgacagagaactcgcaggtcgatccggtgacagaatccgccaaagcgattgttgagattgaacactggctgaatgagctgccgggtgtttcagcggatattctgcgtctggccgggctggtgggggaatcccgtcatgcagggcgtttccttgcgggtaaaacggcggtgaaaggggcgaatcagccggtcaatctggtgcatcaggatgatgtgattgccgcgatccgtttgctgatccagcgtccgcacggcggtcatctgtataatctgtgtgcgccgcagcacccgtcacgggctgaattttatccggatatgtcccgtcagattaatttgctgccgccggtgttcagagaagaagatatcactgaaggaaaagagattgacggcagccgcatctgccgggaactgggctttgagtatcagtaccctgatcccggccggatgccgatgacggagtaagtattaactgaccggcagtgccacgatatcgcggtacgccgggcgggtttcaatcagtgcaaaccagcgctcgatatgcgggaagtccggtcggtcatgacacacttcccgccacggatagagcagcggcgccagtgccatatccgcgatactgaaggtatcaccggcgatataatcacgctgtgcaaggtcatcattgagcatggcaatcaggcgattcagagattgtttcagctcctccacccgcgccggatcgcgctgctctgccggagttctgaccagcagtcccatcatcgctttgatatacgggaacagactgtcgtctgaccagtacatccattgtgccgcccgggcgcgaaattccgcattgtgcggcagcagtgtgccgtcatcatatttatccgccagataactgagaatggcattggattcccagagaataaattcaccgtcctgataggtcggaatagttttattcgggttcatggcgaggtattccggggtatcgagaccgccgaacggcccgcccgcatctttctgctgataagtcagccccagttcagtcagacaccataagactttcttgacgttagacgagttttttctgccccagacggttatcatagtgactcctgttgatagatatgcgatgacgtgtgcgtattgtcggttattttgtgtcatgaagtgtaaatttttacacgaaatccccgtaacaggaagaatcgcgttaaagtgtcattggcttaccattcatgaaatgaatatagtattcattatcacagagttatcactcttatttttgtcacgatgtaccgggtttaaagagggaagagtaatgcagacagtaatcagttcacgggtaaccggtttaatcggcgggcttgctttcggattcttaagcatcggccacgcgtttgcggaggaaacaccggttgcaccgcaggtggatgcaaaagcgtatgtgctgatggactacaacagcgggaaaatcctggcatccgcgaatgcggatgagcgccttgacccggcgtcactgacaaaaattatgagcagttatgtggtcggacaggcgattaaagccggaaaagtgacaccggatgatatcgtcaccgtcggcatcaatgcctgggcaaccggtaacccggtgctgaaaggctcttccctgatgttcctcaagcccgatgaccgcgtaaaattaatcgatctgaacaaagggatggttattcagtccggcaatgacgccagtattgcgctggcggaatatgtcgcgggcagccaggaaacctttgtttcgcagatgaacagttatgccaaacagattggcctgacaaatacccattttaaaacggttcacgggctggattccgaagggcagtacagtaccgccaaagatatggctctgctgacccaggcgctgatcaccgatgtgccggatgaatatgttatccataaagagaaagaatttaccttcaataagatccgtcagccgaaccgcaaccgcctgttgtggagcactaatctgaatgtggatggtgtaaaaaccggtcacaccagcggagcgggacataacctggtggcttccgcgaccgacggcccgatgcgtctgatttctgtggtgctgggtgcaccgagtgaccgtgtccgctttgccgaaagcgaaaaaatcctttcctggggcttccgtttctttgaaaccgtggcaccggtgaaagccgataccccgctgaccactgagcgcgtctggttcggggatatttcagaagtgccgctgggcgcggaaaaagacatttatgtcactatcccgaaaggcaaactcaaagatctgaaagcgacctttgagctggacagcaccacgctggaagcgccgctggcgaaaaaccaggtggtcgggaaaatcaactttatccttgatgataaagtcgttgaacagcgtccgctggtagttcagcagcaggttgaggaagccggtttcttcggccgtatctgggattatattgtccgcttctttgccggactgtggcattccgtcttcggttaatcacaacagcctgccggttaactgaccggcaggttttctctccgtttaccggtaattccggtatcacgttcagacagtactcctgaaatcacgcctccattcttactgctgccattgttgtatgtaacctcagtgacccgcgaaggtatcttcctgcggaatttaatctgaattaagaaagaaaaacacggaatgcaccatcccgtgcggctattttttatcagagcggcaataatagacaggcagaaaaaaacagcggtaacaacaggagaggcgatgattcgtttatgtccggtcagtaaagataactgggaagcgtgtgtggatctggaagtgcgggaggatcaggaggattttgtggcctccaatgtgtattccctggcacagcttcagtttgtgaataatttcagtgccgatgtgatttatgacgatgaaaccatgatcggttttgccatgtacggtattgatgacgatgatggcatgttctggatctggcgctttatgctggatgcacagtttcagggcaaagggctgggtaaagccgcatttgctgctttactggaaaaaatcaccgcgatgaataacgcccgggagcagccgctgccctggctgcggttgagttatgagccggaaaatgaattcgcaaaacacttttatcagcgtttcggctttaaggtggtgcagatgatggatttcggggaggaaatggcgcaaatgccgctatcatcataaggttattcccctttcaggcggcaatttatcatgctgtctgctgaattaccctgttgaaatccgtataagatccgatattacatcctgatatcggatttttttataaaaaaggaccggtatttttacacaccggtcaataaaggattaaagatatggggacaattgtgtttatcgcactggtcattgccgtggccggaattgtatggatccggcgggtatatctccggataaaccgccttcaggcaccaatcaccgaagcttatgcggcgattgacggcatgctgcatcagcgggcggagaggatcggccagctggtggatatgacggaaaaagccggtatccgggatgcaacgctgttttattcctggcaggatgcgtatccgcgctatacagaggcggcgacactggatgagagtgtcagtgccgcaaatgatatcagcagtgctttttatcatattatgacgctgacagagacattcccggtgctgattgcggatccgcagtttgtccgtattcagctggggatctgtgatgttgaggatgcactgaatcccggtatccgcgcctttaatgaggcggtacttcagtacaatattgcggttcagcactatccggacaccctggtggccgggctgttcgggttcggacccaaaacactgctgctgatgtcctgatatgaaaaaccccgcaatatgcggggttttttgactttccggagaccggggttaatcagtcacacgggatcactttgattgccaggccgccctgtgaggtttcgcggtatttggcgttcatatctttaccggtttcatacatggtttcgataactttatcgagacaaacgcgcggttcgctgacacggcgcagcgccatacgggcggcgttgacagactgaacagcggcaatggcgttacgctcgatgcacggtacctgtacctgcccggcgaccgggtcacaggtcagaccgaggttgtgttccatcgcgatttccgccgcgataaagacctgcatcgggctgccgcccagcagttcggtcaggccggctgccgccatggagcaggcaacaccgacttcaccctgacaacccacttccgcaccggaaatagaggcgttcattttgtacagtgaaccgatcacgctggataccaggaaatagcgggtataggcgttttcattcaccggacggatgaatttatcgtaatacgacagtactgccgggatgatcccgcaggcaccgttggttggtgcggtaacaacacggccgccggcggcgttttcttcgttaacggcgagggcaaacatgttgatccagtcaacaacctgcatcgggtcagtggaggtgttatcactggtaaccagctgacggcgcagtgcagcggcacggcgtggtacacgcagcggccccggcagcagaccttcggtgttcacaccacgctcgataccggctttcatcacgtcccagactgccgccaggtgagcagaaagctcttccttgctgtgcagcgccagttcattctgcataaccagtgctgacagagacagcccggtttcattgcagtgtttctgcagatcagctgcatactggtacggataaggcactttggtttcgctgtccgcagcctggccaaaatgctcttcatcgacgataaaaccaccgccgacggagtaataggttttcttgtacagtaattcatcaccggcgaatgcgctgatggacatgccgttttcatgcagcggcaggttttctttatggaagttcatcccgttatcgcgcgggaaatccacttcatggcgttggtttgccagcaaaaggcgttcacgttcttcaacatccctgataaagcccggtatcgcgtcaatatcaacagaatccggcaggttacccgcaagacccataatgatagcgatatctgttgcgtgacctttccctgtcagagacagagagccgtacacatcaacctgaatgcgggtggttttttccagcagtccggccgcgataagatcatcagcgaactgtttacctgctttcatcggaccgaccgtgtgagaactcgacggaccaataccaattttgaagatgtcaaatacactgaccatattgctcgccccctatgttaaggcgtggattaatagtgtcgtgaagattcacgaagccgttacttttcagttccggctgattattgttgttgctgttgcccgccggagagggcaacagtcatttatttattaaccaaaaaacagctgatacagattgtagaacaccgctgaaattgcaatgagacccatcacaaccacaaacagattactcaggtgaccggcatatttgcgcatcgcaggtactttgcggatggcatacatcggcatgataaacagcagcatagcgatgatcgggccgcccagggtttcaatcatacccagaatgctcgggtctaatgtggcaacaatccaggtggttaccagcataaacagtgcagtcagtttattcagtttagacggtgcaatgcttttgcccttggcgcgtaatgctttgttaaccagaccgttaaagccttcacgggcacccaggtagtgacccaggaatgatttggtgatagcaataaacgcgatgaatggtgcgatataggcaatcatcgggttctggaagtggtttgccaggtaagacagaatagagatgttctgatcttttgcttcctgcaggttctgcggggagaggctcagcacgcagctgaacacaaagaacatcacagtcagtaccatcataatgtgagcgtacgccagaatgcgggagcattttttctccgcattttcgccgtactcttcacgcttggcgacagcaaaggcagagataatcggggaatggttaaaggagaacaccattaccggaatcgccagccacagcgttatcagcagaccatgaccggtgacactggccgtattgctgtcgaaagtgagggttttgaatacatcagtgctccagtgcgggatcagatacagcgccagcaccatcagaaccgccacaaacgggaataccagcacgctcatggctttgacaatcgcggcttcaccgaagcggataatacacataattccgataatcagtaccagtgacagaataatgcgcggcggcgccgtcatatgcatctggttaacgataaagctttccacggtgttggtgattgccacactgtagaccagcaggatcggatagatagcaaagaaatagagcagggtgataaggccgccggctttggcgccgaaatgctcttccaccacttcagtaatatcttcgcccggatttttaccggacagcacgaagcggcacataccgcggtgtgcgaaaaaggtcatcgggaaggccagcacggccatgatgataagcgggatcagcccgccgataccggcgttaatcggcagaaacagtacgcctgcaccgatagcggtaccgtacagtccgagcatccagacggtatcggacttacgccatttgcgataatcattgctggtgtcagtcttgctgaccacaacctgcggttgtgttgtatccatagaagtctccaaaatgtacaacaataacaacaattaaaattttgcacgctgatctgtgcatttattcgtctctgaaatagggtctatgtacgtaaccagataaaaaataagtaaagctaaaaagtcaccggcaattgcttaccggtaaaaataataaacagcagcgacctgatatctgtaatggataaataaaggtctctgcattaattcatattcaaaagtacccgaaattgataactctctttctgatggtgaaaatatactgtttttcagtggaaaacaccgtgatcacagtctcaaatgctataaatcacagtaaaacaggctctgttgcaagatttgataaaattgttaatccgggtttacggaatggagtatgccgaaacggcatagagggattgtgtgctctgtaataatgcggtttttgtctgtattttatttaattaaattaatttattcatatattaataaatatatcacccgcacaaaccgcattatttaaaaatagtggcaagcctgatttttacaggattaaagaccctgtttaaagtatggtttatttgtgttatctgttgtttttaatgtaaaaaatattttctgattaagtatgtgactgtaccggaagtatgttgaaaggcaggcagtataaaatatggctttatataatgatcacattgtctgtctcagatgattaaaataattattttaatcacgaattaagtcacttgcgtgatactggtgtcatataaaacagaaatgttaaataaataccagaataatattctgtgaacaaaaataatactgccggcagtgaaaaatgcggttaaaaaaatcgccggcggcagaaataaaacagcgataaaaaaataccggcgtgcaggccggtatcgcgccggtaccaacagaacccggcaggttgcccgccggagagggcaacagtcatgtatttatcagccaaaaaacagctgatacagattgtaaaacactgctgaaatggcaatgagaccgatcacaaccacaaacaggttgctcaggtgaccggcatatttacgcatcgcagggactttgcggatagcgtacatcggcatgataaacagcagcatggcgatgatcgggccgcccagggtttcaatcatgcccaggatgctcgggtccagtgtggcaacaatccaggaggtcaccagcataaacagtgcagtcagtttattcagcttagacggtgcaatgcttttacctttggcgcgcagtgctttgttaaccagaccattaaagccttcacgggcacccatatagtgacccaggaacgcgttggtgatcgcaataaaggcgactaacggtgcgatataggcaatcatcggattatggaagaagtttgccaggtaagacagaatggagatgttctgatcttttgcttcctgcagattttgcggggagaggctcagtacacaactgaacacaaagaacatcactgtcagtaccatcataatgtgggcgcatgccagaatgcgggagcattttttctctgcgttatcaccatattcctgacgttttgcgacactgaatgctgaaataatcggagaatggttgaacgaaaataccatcaccggaatcgccagccacagcgtgaccatcagaccgcgtccggtatcaccggcagagtgactgctgaaagatagcgtatcaaatatcgcggtattccagtgcgggatcagatacagcgccagcaccatcagaacggccacaaacgggaacaccagcacactcatcgctttgacaatcgcggcttcaccgaagcggataatacacataatcccgacaatcagtaccagggacagaataatgcgcggcggcgccgtcatatgcatctggttaacgataaaactttccacggtgttggtgatagccacactgtagaccagcaggatcggataaatagcaaagaaatagagcagggtgataaggtttcccgctttggcgccgaaatgctcttccaccacttcagtaatatcttcacccggatttttaccggacaatataaagcggcacataccacggtgcgcgaaaaaggtcatcgggaaggccagtaccgccatgatgataagcggaagcagcccgccgataccggcgttaatcggcagaaacaggataccggccccgatggctgtgccgtacagtccgagcatccagacggtatcggatttacgccatttgcggtaatcattgccggtgtcagtcttgctgaccacagcctgcggatgtgttgtttccatagatgtctccaaatttgcaacaaataacaacgaaaaattgcacggtgagctgtgcacaaaatgtgtctctgaagcagggtctatgtacgcaaccggataaaaataagtaaaacgggaaaattacctgtaattgcttaccggtaaaaataataaacagcagcgacctgatatctgcaccgggcaaataaggtctctgcattaattcatattcaaaagaatctgagattgataactatctttttgtagtgaaaatgtaccgttttatagtgaaaaacgctgtgatctgtatctcaattgctataaatatcattaaaagtggttatgttgcaacatttaataatgatgttaatcggtttttgaggaatgatgtatgccgaaacggcataggagagcagatattctgcaataatatcgttttcgcctgttttttatttaaacaaatttatttattcagatgtgaattagtatatgtgctgcacaatatcgcattattacagaacagagataaaaacgtttatcactgggtgaaaatcatttcaggaatatgaataattatgttattcattgtttttttaacgataaattactgtgcttttgagtttgtggtgattaagagagaatgcggggaatccgatagtataaaacagggattatataatgagcccattgtatatccctgatgattaaaataatttttttaatcgcgaattaagtagcctgagtgatattgatgaagaataaaacagaaatgttaaataaataccggcacacggccggtattgtttgatttacctttgtattgttatccctgcacccagcctttacggataggcatggcaaaacagtgccggtagagcacctgcagccggttttgcagtgccgggccgaacaggctccagagcagctctgtcagcgcacaggcaatcagcacagtgataaaggcacccagcatatccaccggccagtgaacgccgaggaaaacccgcgaccaaacaacaatcagtgccgggatcatcagcagcaatcctgcacggacattgcaccagaacaggcagcccagtgcaaaggtaaacacgataatgccgtggttgctcgggaatgaggccgtcggtgcgtgatcaaggaaactgtggccgaacggttcggcaaacggacgggcatgcggccagagtgtgccgataatccaggaggccgcgaaaccaatcagcagagcaatggcacttttgcagacagcgcggcgctggcggaccatattctccggtgttccccgcagccagaaccctgcggcgacaaccggaaacagcagaaccagatatttagccgcgaaagtggcggcaataatcatggcatgagacgtttccggcgtggcattaatcaggagaaaaagcgaatgattcagattttccagcacagcagactccttaaaaaacacacctgtatatacccggtaataaaatgacgggtcagggtagccgtcttgtgcatcaaggtaaagtaaaaatgtcttggttaatcgtgctattacgtaacattgcagaaaactgacaaaatctgaaataacaacaggcgggataaacagcaggcaataaaaaacccgatagttaaaaccaaattggtgactatcgggcttcctcaatcttggggatattcaaagaaaagcagtggcacttattcagactgcgccccggtaagaaagttcgaaaaaagattcaaaaaaatgaaaataattttttggtgttgaaaatcagcgggatagggaggaataaataagccgcttcccgggcgggaaacggccggatagcttagctgaacagaccaagattggctttcgcgtaagcttcgaaatcagtgcagccgccgatgtgcttttcatcgataaaaatctgaggaaccgtttcaaccggtttgccgacagtgacagataaatcttctttgctgatgccttcagcgtgaatatcaatatagcgataatcgaagtcatcacgctcatttttcagtttttctgcgagttctttcgcacgaacacaataaggacaacccggacggccaaaaataacggtatacatgaaaagctccttcattcatcagtaacaccggaagtggtgctttaatgggataaattatgcctgtatcataacggatagaaaagaatgttgtgacgatttgtgcggtagtccgcaccaatggttcagtgactatccgcagtgcggacataaaaggcagaatcacagaggataaaatgaccagaaaacagccgcgacaaatgcgttcattaggggatatgccgcgcccggtaattatctgtgaggtcatcggtgtgatattactggtgctggtctatctggcggtgaatgattttatttcgctgcccggatttatgagcagcaaaaatgccctgatggtgatggcgtttgccggcctgggatgtctggtaccggcggcaatcaatattgtctggcgggccatcagcgccatgccgtccgtgggtattgacagcaaaagcgggccagacaaaaagacccggcagaagaaaaatgaaaaaaagcaataaaacgttattccccttcacgtttttcagctaagatccgtcattggtctgcgggtgacggttttccccgctgtacttttgtttttccggttaaaaggtttcaggttcatgatcattcccgatctcacgatattacgcacatggctggatcagatgaaactctcctgttttgagtgtgattcctgtcaggcactgcatctgccgcatatgcaaaatgtggacggtgtatttgatgccaaaattgatatccttgacgatatgctggtgttctcggcgctggcggaagtccgcccgaccgcgattgtcccgctgattgccaacctgagccagatcaacgccagctcgctgctggtcaaaacctttatggatattcaggattccgccatgccgaagctggtggtctgttactcgctgccgctcagtgccgggctgacatttgagcagttctctctctccctgcaactgatggaagagcaggtcggtgcagtgatttttgagctgttcagtaacaatatgctgtttgatccgaatgatgcggaaccggaagatgaagaaagcttccgcgctgattccgttccttctccggtgatccactgattatccgtaccactttcgatatccgggacaccatcatgcattgccctcagtattccgccggccgctgccgttcctgtcagtggcttgaaaaaccctatattcagcagattgatgataaagagcaggatctccgcacgctgctctcgccgtttgccgttaacaactggctgccgccggtccgcagcgcggaaaccgcgttcagaaataaagccaagatggtggtcagcggcagcgtggagcgcccggtgttcgggatcgtgacggataacgaaccggtggatttatcggactgcccgctctatccgccgcattttgccgaggtgtttgccgtactgaagccctttatcgcccgtgccggactcacgccgtacaatgtggaacgccgccgtggtgagctgaaattcctgcttctgaccgaaagccgcgccagcggtaaaatgatgctgcgctttgtgctgcgctcagagaaaaaagtggcgcaattacaggcggcactgccgtttttgcaggcgaaactgccgcagttatcggtgatttccgctaatatccagccggtcgcgatggcgattctggaaggtgagcaggaaattatctttaccccggatgaggtactggaagagaccttcaacggcattccgctctatatccgtccgcacagctttttccagaccaatccggctgttgccgcgcagttgtatcataccgccggacagtgggtgcgtgagctggggatcacccgtttatgggatctgttttgcggtgcgggcggattcggcctgcactgtgcggataaatccacacagctgaccgggattgaaatcagcccggaagcgatagcctgcgccacccgctcagcggaaaaaatggggctggagaatgtcacctttcaggcgctggattccgcgcagtttgctctcggcaaatccgccgtaccggaactggtgctggtgaacccgccgcgccgggggatcggtaaagcgctgtgtgattatcttaataccatggcaccggagacgattatctattccagttgcaatgcacagagcctggcacaggacctggcgcatctcacacagtatcagccgcagcgcgtgcagctgtttgatatgttcccgcataccgcacattatgaagtgctggtgctgctgacccggaaataatcatcagagaataaaaaaaacggggctgcgtgtatacgtcagccccgtttctgtatgagcggatcagttacggtgttcgaatgccagtgcgcggcgttcaatcagacgcatcgccagcgtcagcaggctgttgacggccagataaataatccccgcagcaataaagacgttcagatcgtaatcctgaccaaacaggcggcggctgtaacccatcacttcaagcagtgaaattgtcgtggccagtgaggtacttttgaaaatcagcaccacttcgttggaataggacgacaatgcacgtttaaaggcatagggcaggataatccgcatggtctgcttctgcgacattcccagcgcctggcaggactgccactgacctttcggaattgctttcactgcaccgtagaacagcagtgtcgaataggccgcactgttgagcgccagtgtcaccatggcacagagccacggggaggacatcagttcccacagcagcggatagtttttcagcccttcaaactgcgcgggcccgaaataaatcaggaaaaactggaccagcagcggcgtcccggtaaacagggtgatataccctttgaccagcggcgtcagaacccggggtttgagagagagtaccagtgtaaacagcactgacagcagaaacgccgtgatcagtgcggtaaaggtcagtgacagactgaccggcaggcccggtaagacggcaagaatataatcaaatatgctcattggccgctccgttcaaaacgtgtggtacgcagttcgattcgtttgaggatgtactgactgaccagcgtgatggcgaggtagataagcgccacgatgctgtaccaggtgaaaggttcttcagtacggcgggcaatgctttgtgtctgcagcatcagttcgttaataccaatcagatagaccagcgcggtatctttcagcagaaccagccactggttacccagccccggcagggcatgccgccacatctgcggcataacaaagcggaggaaaatggtggcgcggctcagaccaagcgcctggcctgcttcccgctgtccgtccggcaccgctttcagggcgccgcgcagggtttgtgacgcataggccgcatagagcagagacagggcggtgataccgctgaagatcggcacatagggaccgttgtcgatctcaagcgtcagggtgaagaagcccagattgataccgtcgctcagctgaataatcacttcctgtgtgccgtaatagacaaacaggaccaccagcagctcaggtaaaccacggataagcgtaacaagacaggttccggcaaaggcgacaggtttccagcgcacggtttcccagagggtaaacagcatcgcgagcaccagaccgatcagaagtgcagaaacagcaaggccgacggttaccccggcggcgcttgctaaagagagaaaatcgttcattaattttttatgttattactcaaaccatttcttatagagggtatcgtaagtaccgtccgctttgacctcaccaagcgccttgttgagtttgtctttcagctcgctgttgcccttgcggaccgcaatagccaggccggtgccgaaatattccggatcggtgacgcgctcacccacggttttcagattgtcgttgctcttcagccattcattgataacagctgtgtcaccgaatacggcgtcaatacgtccgcctttcagatccagtaccgcgttctggtagctttcataaggcacaattttcatgtccttaaactgctccatcaggtatttctgatgcgtggtgccgttctggataccaatctgtttccctttgaggctgtcaatgctatcaaatttgcccgcaactgcaacgaaaacagcagagttatcataataggtattggtgaaatcaacctgcttctgacgctcaggtgtgacgtcaattccggccatcagcgcgtcaaaacgcttgtatttcaggctcgggatcaggctgtcaaacgcctggttggtaaaggtgcattccgcattgattttggcacacatcgcctgagccagatccacatcaaaaccgacgatttcgtttttctcattcacggtttcaaacggggcataactcgcttctgtcgcgaaacggattttttctttttctgccgccgctgcggagaaagcaaacgcgccgattaatgcggcaataaccagttttttcatagcaacatcctatttttaatgttcagtggcagaaaataatcagtgtgacagataaccggcaaatgcctctgtctgcggcgtgataaagcattgggcgccgccctgttccacgatgcggccgttttccatatacaccaccttgctggcggttttacgggcgatatccacttcgtgagtcacaatcacctgggtaatcccggtctgtgacagctctttaataatatcgacgacctgagaggtaatctccgggtccagtgccgctgtcggctcatcgaataacagtacctgcggctccatcatcagggcacgggcaattgccacacgctgctgctggccgccggataaatgcagcgggaaacggtttgcaaaatcggtcagacgcagacgtgtcagcagcttttccgcttttgcctgagccgcttctctggtcagacccagcacccggatcggtgcttctgtcaggttatccatgacagtcagatgcggccacaggttatattgctggaacaccataccgacgttctgacgcagggaacggatctctttggcagatggcgtggtggtaaaatcaaaatggtgatccgcaatggtcagttcaccggaacgcggcatttcaagcaggttcagtgcccgcagcagcgaactcttaccggcgccgctcggcccgagcagtaccatggtttcgcctgcaccacattccaggttgatatcaaacagcgcctgatgctgtccgtaaaagcaattgatgttttttaattgaatactcatgctgtaattctgcatactcagtgacgttgagtgaatattaacgccgtaagaataaatatgcaattatttctgcataaaaaactactaaaaaagcaaactaatgacttttactgagtgattatgtcttatcagatgccgggatgacgtatgctgccgcccgtttgacgatggttttcgccattcctttaaagatgaataaatgagcaggcatcatggcgaaccagtagagcagcccgctgaatccggcgggatgccaccaggcacggacatccagcgtccgctggtggccgtggtcgcggatggtaaaggtcagccgtcccagcccgggggctttcatgccgaacagcagggagagctgctgccggggtttcacggtgatcactttccagccgtcgattttatccccgggttcgagggtatcgcgatccgggcggccgtaagtgattttattaccgcacaggtcatccagccgggcgcggactgaccacagaatattggcgtaaaaatagccgtctttgccgccaatctgctgcacaacatgccacagggcatcggcggaggcagaggtattcagggtaaaaccggcctgtttgggatagaaaccgaaacccggccgccagcgggcgcggacttccgggtcataaccccagtcttcattatccacggcatccgtttcatctttaagggttttgcgtacggcattatcaaaactgagcagcgtctgcgggatcagcgcctgaagcggttttccgtcgccgggcagatcatatttcagccccataatcagctctttggcgataccttccggcaccgtggtgataagccgcagaaagtgaactgaaatcagccgcagcgggatcggcagcgggatcatcagccgctttttaccgctgatggtaataaagtggcggaacatctccagatagctgaggtaatccggccccgtggcatcaaaacggcggttttcggttgcagggtgagagagcaggccggtcaggtaattcagcaggttttccagtgccaccggcgaggattttgaacgggcccagcgcggcggggtcaggatcggcaggttgtacaccatgtcgcgcatgatttcgaatgccgctgagccgggaccgacaataatggcagcgcggatctcggtgaccggcacgcggctgtccgcgagaatttcaccggtcagcctgcgggcggcgaggtgcggggaatcgctgtctttgtgctgcatggcgctcaggtaaatgacttcccgcaccgcagatttattcagcatctcctgcacgttttccgccgccaggcgctcccgtgccaataaatcatcctcatccgtcatactgtggacgaggtaatacaccacatcaatgtcctgaaacagcgtttccagggtggatttatcatacagatccgcatagcagcagcgggtgttttcccagccctgcgcctgcatccactccacccggcgggcggcggcagtgacctgatgaccggcggcaatcagctgcgggataagattttgtccgacataaccgctggcacccagcactaaaatccgttgttgtggcatacgttttcactcttcaggtaaacagggctatcagcaccggggcaaacagactgaggacaaagccgtgcacaatcgcggccgggacaatcgacacaccgccgctgcgctgcaataccggcagggtaaagtccatcgtggtggcaccgccgaggccgagtgctgcggcgcggtggcggttgatcagcagcgggatcagcataatcgcggcaatctcccgcgccaggtcgttaaagaagccgacactgccgagcaccgggccgaaagcgtcggtcagcagaataccggacagcgaataccagccgaagccggaggagagcgccatcccggttttgaccggcagcccggctatcagtgccgcgagtgcgccgccgagcagcgaggtgaccactacaatcagcgagaccagcataccgcggcggttgatcaggatctggcgcagcgtcatgccgctgttgcgcagctggatcccgacgagaaacagcaggaaaatcagtgcgtattcactggcggcaccggcaaaggcgagaaacgaccagccgaataacccggtggtaaagccaaccagcagcacaccacacagttgcagggattccagcaccatatgcaggcgggaaggcggtttttgctgtttgtgagccggaacctgccacgggtattttttgccgtataaaaacagtccggcgaggttacagcccagcaccaccacagaaaaggtcagggtgtactgcacaatcaccagcagatttgccccgaggttttccaccagcgccaggcttatccccatcagaaataggatcacatacaccatcgcgctcagaccacggccgatgatttttttcagtgccgtgctgctgaccgggatgagataacccgcaatgagcggggcgagaataattaataaccctgaatacatgtgtgtcgtttccgtaaaataatgccgtctttacttatgttcgtgtcagtatctgattaaaaagcaggcgattatagcggcatcctcaccataattgctacgtatccctctgttttcgtgtttagtataagtcaaaaccgtttttatttattacattgtgataatactttattgtgatcattattgtgacagtattgtcataaaacaggcggtatccggcaaacagtgagggaactatgattctggaaagagtggaaattctgggttttcgcggtattaaccgcctgtcattaccactgaccggcaatacggtactgatcggtgagaacgcctgggggaaatccagcctgctggatgccctgacgctgacactgtcaccgcaggcactgaatgcgaaatttgttctgagtgatttttatcacgctgctgacagtgaagccgggcctgtccgtcacttacagatcgtcctgacattccgtgaaacccggcccggacgttcccgctcccgccgtttccgtgagctggcaccgctgtggcgcactaacggggatgaatatctgcggatcaactaccgtgtcagcgcggatctggcggatgataacaccattaccagtcagcgcacttttctggatgaggcgggcgagccgctgctgccggcggaaaccgataagtttatcagcgagattatccgcctctatccggtgctgcgtctgcgcgatgcccgttttatgcgcggcctgagaaaaaatgagcctgattgtgaggatgaggaatacgatctccgtacacagaccgagacgttcaataaccggatggcggatctgacccgcgctctggtgagcaacccgcagacactctccaatgatgatttgcaggacggccttgaggctatgaaacagctgctcagccactactttgccgagcagggggaatacctgctcgatcgccgtaaagccaaacggctgaatatcgaaccgcgccagcgggcgtggcaggcgctggaagggatcaaccgcgtggtggcaggccccaatcagcgtaatgtgcggctgattatcctcggtatgtttgccgcgctgctccagtccaacagcggtctgaaactcgacccctatgcccgtccgatcattatcgttgaagacccggaaacccgcctgcatccgatcatgttgtcggtggcgtgggggctgctcaatctgttttccttacagcgcattaccaccaccaactccggtgaactgctctcactggtaccgattcatgatatctgccgcctggtgcgggaatccacccgtgttgccgcctaccggctgggggaaaaccatctgtcaccggaagagctgcggcgtatctcattccatatccgctttaaccgcccgtcggcactgtttgcccgctgctggctgctggtggagggtgaaacggaaatctggctgatgaacgacctggcaaaacagtgtaactattactttgagaccgaagggatcaaggtgattgagtttgcccagtgcggtcttaaacctttgttaaagtttgccaacaaaatgggtatagaatggcatactctggttgacggcgacgaagccggtaagaaatacgcggccaccgccgcacatttttcatcggggctcaatgatgtcgagcaggacagactgacccgtcttcccgcgccggatatggagcatttcttatatcgcgaggggttcagccgcctgtatcaccaggtcgcggatattccggaaaatataaaaatgccggcccgccgggtcataaccaaagcgattcaccgcacctcaaaaccggatctggcgatcgcgattgccaacaatgcggccagccggggtgtggattctatcccgttgttgctgcgccggatgttctcccgcgtggcatggctcgccagagggcgcgctaactgaggaaaaaggtgttaatgaaagcagtttcaaagaaaaaaatagtgaccgccggcattctgattattctgatcgccggcggtttttggttctttaaccgcgaagatgcgccggtcagctatatgacagcggatgtgcagcgcggcacactcgaaaagaaagtgatggccaccggcaagctggatgcactgcagaaagtggatgtcggtgcccaggtcaacgggcagctgcagaccctgaacgtcaaagagggtgattttgttaagaaaggcgatctgctggcggtcatcgacccggtcaaagcacagaacgtggtgattgaggccgagcagacggtcagtgaaatcaaagcgcggctgaagcaggcagaggcggagtatgcctttgcacaggcaacctatcagcggcggctggcactggcaaaaactcaggttatctcaaagcaggatgtggacgaggcgcggcgcaatatggatgtgcagcgtgcggcgattgatacctataaagcgcaggtggcacgcaatcaggccacactcgataccgcccgcaatgatttgcagtacaccaatatccgtgcgccgatggacggcgtggtgacggagctgaaaacattacagggccagacggtgattgccatgcagcaggcgccgaccatcctctccctggcggatctcgataccatgctggtgaatgcggaagtctccgaggcggatgtggtgtatctgaaacccggccagaaagccacgttcagcgtgctgggcgcgccggacaaaaccttcagcggcgtgatcaccgatatcctgccgaaaccgcagaaaatcaatgacgccattttctattatgcccgttttgaagtgccgaacccgcagcatgtgctgaaactggacatgactgcccaggtcactatcgcgctggaaaaccgcgaaaacgtgctgaaaattccgctggcggcactgggtaaagagatctccccgactgaatacgaagtgcaggtgctggtgaatggtcagccggaaacccgtcaggtgacactcggtacccgtaatgatgtggaagccgaggtggttaaaggcctggcggagcatgagaaagtggtgaccggtattgatgacggcacagcaggataattcatgagcgcattattagaactgcggaatatttaccgccgttatccttccggagacagcagtgtcacggtgctggatgatgtctcactgactatcagtgccggtgaaatggtggcgattatcggccagtccggctccggtaaatccacgctgatgaatatcctcggctgcctggacacgccgagtgacgggcactattttgttgccggaaaaaacacggcagagctgagcggtgatgaactggcggcgctgcgccgtgaacatttcggctttatttttcagcgttaccatctgttatcccacctcagtgctgagcaaaatgtggaaatgccggctatctatgccggactgagcgcccgtgagcgccgtgaacgggccgcagcgctgttgcagcgcctggggctgtgtgagcggctgatttaccggccgggacagctctccggcggacagcagcagcgtgtcagtatcgcccgtgccctgatgaacggcggggaagtgatcctcgcggatgaaccgaccggcgcactcgacagtcagtcgggcaaagaggtgatggctattctgcgccagctctgtgacgccggacatacggtgattatcgtcacccatgatccgtccattgccgcacaggcggcgcggatcattgaaatcaaagacggacatatcctcagcgacagcggatcagtcattaacccgcaggcgaaagcgctggctgcgaaaccagcgctgaaaagcagcgcgttcagccgtttcctcggccgctttaatgaagcgctgctgatggcgtggcgcgccatggtggtcaacaagatgcggactctgctcaccatgctgggcattattatcgggattgcctccgtggtgaccattctggtgatcggggatgctgccaaagcactggtgttgtcggatatcaaatccatcggtaccaacaccatttttgtctatcccggcaaagatttcggcagtgacccggggcaggatcagcaatctctgaagcccggcgatgtggatgtgatccgccagcagccgtatgtttatgcggcgtcagcggaaatagagaacagtgcgcgtctgcgccggggcaatcttgattctgcagcccgtatcaccggcatcgggccggactttttcactgtgtatgacatgcgtttcggcgaagggcgggcgttctctccggagatgtacgagcgccgctcccaggttgtcatcatcgatatgaataccaaacgcaaactctttccgcatcagaataatgtgatcggggaaatgctgctggtgggcaacatgcctgcaacggtggtcggtgtgattgcggatcgcaaatccatgttcggtaactcaaaaaccttacaggtctggatgccgtacaccaccctgactgggcggctgatgcagcgcaactatctggatatgatctctgtgcgcatccgcgacggttacaacaccaaaaatgcggaagagcagctggtacggctgatgacgctgcgccacggcaaaaaagataccttcacctacaacctcgacagcattgtgaaaaccgtggataaaaccacgaccaccatgcagctcttcctgacgctggtggcggtaatttcgctggtggtggggggaattggtgtgatgaacatcatgctggtcagtgtgacagagcgcacccgcgaaatcggcatccgtatggcggttggtgcgcgggcaggggatgtgatgcagcagttcctgattgaggcggtgctggtgtgtctgatgggcggggctatcggcctcgggctctcatactctattgcctttgccgccaaaatggcactgccggactgggaatttgtcttccgccctgcggcgattgtcagcgcggtgatctgttcgaccgctatcgggatcatcttcggctttctgccggccagaaatgcagctaaacttgatcctattgatgcactggcgcgggagtaaccgcgcacagtctgaaaatacgaatacgtcgcggaatgacgattgacattgccgcgacgatccgcataattttgttaaataccgtgttacggcgctgtggtgtcgtcatcttcagtaaccggaataatcacactgacgtgatgcccttttggtccctgaatggtgtcataattcactttctgacccgccttcagcgtgcggtagccgtccatctgaatcgtcgaatagtgtacaaaaatatcgtcaccaccatccgacgggcagataaacccgaaacccttggcgttgttgaaccacttaacagtacctgtttccatactgttacaaccctcatctgtcaaacgattgaaaaatgctgcacaatgcaccatatgatccataatactcagtaatgaagtatcagctgtacgcggatatactggttacgttgtacattatttatactctattgaattagagggtaacgtcaagcctttgtttacagcaacactgtattggcctgtaaagtttgatacagataacgctaagtattgatacgcctgatgtggcgtacgttttctataaccggaatagcaatgagtcactatcaatctgaatcacaaacggatgtcacgctcagggaaaaagcgctgcagaagatacagccaccgtcaatgtacaaggtggttttaaacaacgacgactatacccctatggactttgtggttgaagttttacaaaagttcttttcttataatgttgatcgtgcgacgcagattatgctcgacatccattatcagggaaaagggatctgcggggtatttaccgctgaaatcgctgaaatgaaaacaacactggtcaatacgtacgcgaaagacaacgatcatccgttgctgtgtacactcgagaaggtataagaatacactttgtttctctgaatggaggtgcctatgctcaatcaagaattagagctcagtctgaatatcgcctttgccaaagcaagggacaaccggcatgaatttatgaccgtagagcacctgctgctggcgttattaggtaacaaatcagcccgtgaggcgcttgaagcctgccgcgttaacctggccatcctgcgccaggaacttgagcattttattgaacagaccacaccgctgctgccggaaggggatgatcgtgaaacccagccgacactcagtttccagcgcgtgttgcagcgcgccgttttccatgttcagtcatcgggccgtaatgaagtcaacggcgcgaatgtgctggtggccattttcagtgagcaggagtcccagggggcttatctgctgcgcaagcatgatgtcagccgtctggatattgtgaatttcatctctcacggcaccaccaaaggtgaggatgaaaatgagagcggcccgtcctttgatgagccgtcacagtctgctgccgaagagagtaccggcggtgaggacagtctggataatttcaccaccaatcttaatgacctggcccgtaaaggccagattgacccgctgatcggccgtcaggcggagctggagcgcaccattcaggtgctgtgccgccgccgtaaaaataacccgctgtttgtcggggaatccggggtcggtaaaaccgcgattgcggaagggctcgcctggcgtatcgagcaggatgatgtaccggaagtgatcaaaggctataccattttttctctggatatcggctcactcctggccggtaccaagtaccgcggtgatttcgagaagcgctttaaggcactgctgaaagtgctggagaaaaacgaaaaaagcattctgtttattgatgagatccacaccatcattggtgccggtgcggcatccggtggtcaggtggatgcggcaaacctgattaaaccgttattatccaacgggaagatccgggtgattggttccacaacctatcaggaattcagcaatatctttgacaaagataaagcgctgacccgccgtttccagaaaattgatatcaatgaaccgactgccgatgaaaccgtgcgtatcattaacggcctgaaagcccgatatgaggcacaccacgatgtgcgttacaccgcgaaagctattcaggcggctgtggatctgtcggtgaaatacatcactgaccgccatctgccggataaagcgattgatgtcattgatgaagccggggcaagaacccgtctgatgccgctgagccgccgtaagaaaaccattggcgtcggtgaaattgaggcaattgtggcacggatcgcgcgtatcccggaaaaaaccgtttccagcagtgacaaagatctgctgcgtaacctcgacagccgcctgaaaatgctggtcttcggccaggatccggcgattgatgctctgacggaatccatcaaaatgagccgtgcgggtctggggaacgagcagaaaccgattggtgccttcctgctggcagggccgaccggggtcgggaaaaccgaagtcactgtgcagttatccaaagcaatgggtatcaagctgctgcgctttgatatgtccgagtacatggagcgtcacaccgtcagtcgtctgattggtgcacctccgggctatgtcgggtttgatcagggcggattgctgacggatgcggttatcaaacacccgcatgcggtggtgctgcttgatgagatcgaaaaagcgcacccggatgtctttaacctgttattacaggtgatggataacgggacactgaccgataacaacgggcgcaaagcggatttccgtaacgtgatcctggtgatgaccaccaacgccggtgtgcgtgaaacccagcgtaaatccatcgggtttaccgagcaggacaacagcactgacgcgatggcggaaatcaaacgggtgttcacaccggagttccgtaaccgtctggacggcattgtctggtttaatgcgctgtcgcagccgattatcgctcaggtggtcgacaagttcattgttgaactccaggcgcagctggatgcgaaaggtgtttccattgaagtgtctgcccgtgcccgtacatggctggcagaaaaagggtatgacccggcgatgggcgcacgtccgatggcccgtgtgattcaggataaactgaaaaaaccgctggcgaacgaattactgttcggtgagctggtgaacggcggttcggtgattatcgatcttgataagaagaaagatgaactgacttaccgcttcagtgccctgaaagagaaatccggcgacccggtagcctgacagaaacgatcaccacaggacacgcactccggtgcgttgcctgtggtgtctttttatgaggcgtggcctgcagggatcagcggctacggaagacgatacggcctttgctcaggtcatatggggtcagttctactgtaaccttgtcgcctgtcaggatgcggatatagtttttacgcattttaccggagatatgtgcagtcacaacgtgtccgttttccagttccacacggaacatcgtgttcggcagtgtatctaacacagtgccttgcatttcaatattgtcttctttggccatctaatcctctaatgttaataaccagtattttcaaaccgcaagataatgccgaaaaaccgggattatgtaaaggaatgatattttttaagcaccgcgtctgaaacataaaacgggctgaaacataccatttcctgttggtttacagcgattttataaaaaaggcggtagttgtgacggcaccggacgtgctaatgtctgcggctgccagcatgactgcggtaaatgattatcacgcagctgataaagctgacggataaacgcctgtcgcgggatctcccgcgcaccgaatgattcggtgtaatgattcagtatctgacaatcaaacatcctgccgccgtggccggtaaaatgggcaaaaaaggtcataaaagcgatttttgacccgttactgacacggttgaacattgactccccgcagaacagtaacccggtattcaggccatacagcccgccgaccagcgcgtcatcatcccacacttcgaccgaatgagcacgtcctgcctgatgcagccggatataggcggccacaatatcctctcctatccaggtaccctcgtcccgctctgtacaggcccggatgacctgctcaaaggcatgattcagtgtcaccctgtacgggtgttttttcagaatcttgtgcagcgaacggctgacatgcagctccgccggatacaataccgcacgcggatccggcgaccaccacagaatgggttcaccgggggaataccacgggaaaatcccttcccggtaggcgagcagcaaccgggaaggagagagatccccgccggtggccagcagcccgtccgggtcggtcagcgcgtgttcaacaggcggaaagagaagttcctcatccagctgataaaacggcatctgatcccccggtcattaccggaatacggttcacaaactgataataacggcctctgcgcgccagcagcgcgtcgtgagagccttgttcggctatctgcccgccgtccatcacgcacagcgtgtccatgtgttccaggccctgtaaacggtgggtgatgataagcatggtccggtcacggccgatatcccgcagcagggcgagaatatgctgctcagtatctgcatccaggccttctgtcggctcatcgagcagcaggaacggcgcattatgcagcagggcgcgggcgataccgagacggcgctgttcgccgccggaaagcagacggccgccttcgccgatccaggcattcaggccctggtcgttatccagcagattttccagcccgacctgtgccagcaccgcattcagctgtgcatcggttgcttcgttatttccgatccgcagattaccgcgcagtgtgttattgaacacatgaatacgttgcggaaccactgccatcagtgaccggagggtattttcatcataagcggcaatcggctggtcattcaggcggatttcaccttcactgacatcccatgcacgggtcagcagctgcagtaaggtggatttcccgcagccggttttccccagcagggcaaggtgttcaccggcacgcagtgtcagggagatatctttcagcaccggcagcggctgtcccggataggtaaacccgacaccactgaggctgacgctgacctgtgcggaggctgcaggaccactggccgggaaagtcacttccggtttggtgtcgactatctgcgatacacgctctgcggaggtcatcacctggccgagatgctggaaagccactgccaccgggcctaatgcctcaaatgctgccagggcacagaacacaaacagagcgataatggcgccgctttcgcggtacggccaactgactccggatgccatccacagcatcagcgcaacagcaaacccggtcgccagaatgataatcgcctgggaaagcccggtcagcccggcctggtgctgctgctgtaccagccagcgttgttcagtctccgccagttgctcgcggaagcgggactgcgcaccgaaaatagtcagttctgcctgtccctgtaatgcgctggtcagcagggtgcggtactgtgcacggagtgtggtcagctgcacgccgattggcttaccggcgtaatagaacaccaccggcagggcaaacagcaggaaggtcataaacccgcccagtgcataagcgatagtcagatcgagaaaacccagcccgaatgtcagcactgcaatcaccaccagcgcggcaacaatcggcgaaatcacccgcagatagaggtgatccagcgtttccacatccccgaccagccggttgagcagttctccctgacggaagcgggcaataccgcccggtgtcagcggcaggattttctcaaaggcaaatacccgcagatgcttcagcacacggaaggtcgcgctgtggctgaccagccgttccgcatagcgtccggcggtgcgggagatagcggcaccgcgcaccccggcggcaggcagcatatagttaaaaaaggcaattcccggcacaccggcaatcgccgttccggccaggaaccagccggacagcgtcagcagcccgatactggcgagcagcgtggcaatcgccagcaggatcccgagtgtcagtaaaaaccagtggcggcggtagagggctaaaaacggcagtaaaacacgcatgattacagatcccccgtccggtgtgacagcagctgtgcaaatgcaccctgttgctgttgcagagcagcatagctgccctgttcaataatcagacctttatccatcacccagacttcatcatagtcacgggtttcttccagcaggtgtgtcaccagcagggtggtttgctgatgtgccgcctcattcagggcatgcatcacgcgctcctcactgtgggcatccaggctggcggaaggctcatccagcagcagcagatggcacggattgagcagggcacgtgccactgcaatccgctgtgcctggccgacagagagccgcgcggcattatccccgaccacggtattgaccccgtcaggcagcgaatcaataaaatcggtcacataggctttttccatcaccgccgtgatttcctcaggagaggcatccgggcggctcaggcggatattgtccagaatggtctgttccggcagatgcgggttttgtcccacccagctcagctgtgtccgccagctttccgggcggatatcacgcagctcctgctgattgatccggatactgccttcatacggcagaaaacccagcagcagattgagcagcgaacttttccctgcaccgctctggccgacaagcgcgatacgctgtccggcattcagggtgaaattcagcggcccggccagtttttcccctgacggggcaaaaatcaccagatcggttgcggtaacagcaatctgctctgccggtgccagcggttctgtgcccggtaattcgtcatcattgttttcggcggataacagggtaaacagggattctgccgcgcccaccgcctgtgctttggcgtggtaataggtaccgaggtcacgcagcggctggaaaaactccggcgcgaggatcagagcaataaacccggcaaacagcgtgacacccatgccgtagctgccgaaattcagttcaccgagataggaaaaaccaaaataaaccgcgacgacagcaatcgagatcgccgcgaaaaactccagcacagcggaggagaggaatgccatgcgcagcacttccatggtgcgcgagcggaaatcctcggtggcgtcatcaatctgtttcacttcctcacgaccacggtggaagaagcggatggtttccagcccgcgcaggcggtcgaggaaatcgccgctcaggcggctcagggccagaaagttacggcggttggcatcggcggcacccaggcccaccagcgccataaaaacggggatcagcggcgctgtcaccagcagaatcagggctgccgcccagttgatcgggaacagcgtgatcagaatcatcattggtatggtggcggacagggtcatctgcggcagatagcgggaatagtaatcctgcatatcatcaatctgctcgagaataattgtcgcccagctgcccgccggtttgccttttacccgtaccggcccgagctgttccagtttatccagtactgtccggcggatatcacgtctcaccacctgtccgcagataaacccgacccgttcgcggatcgcggcaacaacggcgcgggcaataaacagtatgaccagtacagtgaacggagtgaggagctgttcgcggggcacgtgctccataatgagggactgaaggaggacagcgaggcaccaggcctggccgataatcagtaaaccgctgagcacacccagcaacatcgagaggcgtaaccatcgccgggccggtgccgcctgaagttttaaccagcggacgagttctgactgtcttgatttatccattttttctgtatgcaggtgataagtaaaaatacggctgaaatcagcaggataatgtcatggtacacgaaaaggcgctacagatatagcgccctgaaaatgctggattatttgctgtctgcgaggctgtcgagatagcgctcggcatccagtgcggccatgcatccggttcccgcagaggtgatcgcctgacggtagatatgatccatcacatcaccggcggcaaacacacccggaacggatgtctgtgttgcattaccgtgcgtgccggactgaacacggatatagccgttttccagatccagatgtccctcaaaaataccggtattcgggctgtggccgatggcgataaagcagcccatcaccggcagctcttcggttgcgtcacttttggtgtcacgcagacggacagcggtcacacccatctggtcgccgagtacttcatccagggtgcggtcagtgtgcagaacgatattgccgttctgaaccttatccatcagacggctgataaggattttttcagcacggaagctgtcacggcggtggatcagatgcacttctgacgcgatattggagagatacagcgcctcttccacggcagtgttaccgccgccgaccactgcgactttctggttacggtagaaaaagccgtcgcaggtggcacaggcggacacaccacggcctttgaaggcctcttctgacggcaggccgatataacgggcggatgcgccggtggcgataatcagcgcgtcacaggtataggtattttccccggtcagggtaaacgggcgtttgctgaaatccacgtcagtgatgtagtcattgatgatttcagtctcaaatttttcggcgtgagcctgcatacgctccatcaggaccggcccggtcagaccttccgggtcacccggccagttttccacttcggtggtggtggttaactgaccaccgacttccaccccggtaatcagtaccggatttaaattcgcccgtgccgcataaaccgcagcggtatatccggcagggccggaacccagaataattaatttactgtgtcgggttgcgttcatgaacacctcattaacagaatggcaaaaaagcgtgtacaggattgtaggagaaacgaaggggtaaaaaaaggaataaaaacggcagagcacaaaattgaaatcagccggaaatgagtagattttcaggcgattgtacgagaaagtgattattcagaagattcctaagttgtttgaatatcacaccaaaagcacgtcctgtttgtcagcgaaacgtttttctgtcattttcttcaacaggttgttctgatttttgttcatttgctttgacaatcggctgcgcatttgcgaaaacatcagtgtaagagatttttatccgtcgggttaatacatcctgttacaccggtgatgtgtttgtcctgatgacgaagcatggtaatttcagcttacgactatagcgataataatctgaatgttccggtaaactggcgccggttgcgtattctaataatcagaaatgcaaagaattggcctgaaaacatgttttccgatgctgattttgttccgtcaggtaaaggaagtgttatgggtgtaggaaaatagtaaataagagagataacgagatgattgataacaaaaagcgtccgggtaaagatcttgacagaatcgacaggaatattcttaacgaattgcagaaagatggccgtatctctaacgtcgaactctccaaacgtgtgggtctgtctccgactccgtgtctggaacgtgtgcgccgtttagagcgtcagggctttatcaccgggtataccgcgctgctgaatccgcactatctggatgcctccctgctggtattcgtggaaattacccttaaccgcggggcaccggatgtgtttgaacagttcaacaccgccgtgcagaagctggaagagattcaggaatgtcacctggtttccggtgattttgactacctgttgaaaactcgtgtgccggacatgtcggcttaccgcaaactgctgggtgaaactcttctgcgtctgccgggcgtgaacgacacccgtacttacgtggtgatggaagaggtcaaacaaagtaaccgtctggtcatcaagacccgttaatttgtttcctgcgtcatgtgcaaaacgggataaatcagttacactcctgtttatgcatacagtttcaacgctgagctaccctcagcgttgttccgttttactgacaggaaaaaaccggacgttgcgtcaggaaatgacatgagccaggaatatacagaagacaaacacatcaaattcagaaaaatcagcagcggccgccggttgctggaagccgtccttattgtgatcgggttgtgcgccgtctttctgctggttgctctcttatcgtttaatccgtcagacccgagctggtcccagaccacctggcatgagccggtgaagaatctggccggcagtatcggggcctggtttgcggatattctcttttccgcctttggcatactggcttacaccgtacccccgctgatgattctggggtgctggtcggccttccgcagtaatgaaaataaagattacgtggactttttctcactctcgatgcgtatcatcggggggctgacactcattctctcatcctgtgccctggcatccctgaatgtggatgatatgcagaacttcgcggcaggcggggtgatcggcagtttattcagctctgcgctgatgccgtggtttaatgccctcggcgcgacactcgcgctgctcagtctctgggctatcggtctgatgctgctgaccggctggtcgtggatcaccatcgccgaaaaaaccggtgcagcggtcctttccccgattaccttcatcaccaatcactcccgtgaccgttatgacgatcagtatcacgacgaccgtgaatatgacgatgaggacgagtactacgacgatgagaaaacggatgagcagacagagcacaacaacataccgcagacagcaactgccgcagctctgactgctgttgcgcctgacagtgaggcacagactcagactgcacagtaccgtgaatacgatgatgcggacgatgtgctgttttccgcaccaaatgcggcggaactggcgcatcaggcacattatgaggatccggcggataacagcgatccgctgctgaccccggtacagaatctctccgcatatccggaaaccgccgctgaatctgtggtgcctgttgtgcatgcacaggaaccggctgaacaggaacacaccgcaccggctgcggatgaacctgaacactaccgttttgatgtcccggatgcttaccggacaaccgttgacctgaatgccccgatcaatctaccggatattcagcctgaaccggcagcaccgcaatgggaaaacccgtttgcgggaagcggccgtacagaaccggtctttacgttcgacctgcctgatgtgccggataccggtgataacggcagcgcacatctgagctctgcggccgcagcaaccgcagcggcggcttttggtgccgtacaggtcaaacaggggctcggccctgaactgccgcgtccgaatccggtgcgcctcccgacccggcgcgagctttacggcatccgcattccgtctcagcgtgacgcggaacttgaacgtctgcgccgtgagcaggatgaatttgcacaactgcatcagccggaacatcaggccgcacagactgagccggatgaagacgacgtattacaggcgcgtctgcgtgatgagtttatgacgcagcagcgtaaccgctacggtgatgatgagacggacatgtctccggcagcagagccggtgcaggcagtaactgaaccggaaattaccaccggtacatcctccgcctttatcccggctgcatctgcctatcaggcaccggtcagccatcactcctttgcatccgcaccgccggtagcggatgttcacccggcggcagaagaagacgatgaagatgagcaggaagctcagcgtcttcaggcgcagtttatgcagatgcagcaacagcgctacagcgggcaggctgacgctattttatctgatctggccgaactgaaagccttctctccggtggaggatctggtggatccggaaccggcagtgccgctgtttatcccgacaccggtcaccgcccctgcggcagaaccggctccggtttatgccgcactggagaccgctgctcagcgctttgaacctgttgccgcaccacagcagaatgcggcaccggtaacgtcacaggaagcacagttacaaaaacagatggaagagagcctgttccatccgttcctggtccgcaatgaccagccgctgccgaaatcaaccaccccgatgccgtctctggatctgctggcttcaccgccgggtaccattgagccggtggatgaatttgcgatggagcagacagcccgtctgattgaggcgcggctcaatgacttccgcatcaaagcccgtgtggtcggttatgaaccgggtccggtgatcacccgctttgagctggatctggcaccgggcgtgaaagcctcgcgtatttccaacctgtcccgcgacctggcgcgttcactctcgactgtagcggtgcgtgtggtggaagttatcccgggcaagccgtatgtggggctggaactgccgaatgaaaaacgtcagaccgtctatctgcgcgaagtgctggactgcgatgaattccgcgatacgccatcaccgctctctgtggtgctggggaaagatatctccggtcagccggtggtggcggatctgggtaaaatgccgcacctgctggtcgccggtacaacgggctccggtaaatcggtcggcgtaaacgccatgattatcagcatcctgtataaagcgaaaccggaagaagtccgctttatcatgatcgacccgaaaatgctggaactctctgtttatgaaggcattccgcacctgctgacccaggtggtgaccgacatgaaagacgccgccaatgctctcggttggtgtgtggcggaaatggaacggcgctataaactgatgtctgctctcggggtgcgtaacctcgcgggctataacgaaaaaatcctgatggcggaatccatgggacggccgattccggatccgttctggaaaccgacagacagcatggaaatgacgcatccggttctgaaaaaagagccgtatattgtggtcatggtggacgaatttgctgacctgatgatgaccgccggtaaaaaagtggaagaacacatcgcccgtctggcacagaaagcccgtgcagcggggatccacctcgtactggcgacacagcgtccgtcagtggatgttatcaccggtctgattaaagccaacatcccgacccgtattgcctttaccgtatccagtaagattgactcacgaaccatcctcgaccagggcggcgcggaatctctgctgggtaacggggacatgctctatctgccgcagggtgccaatgcgccgctgcgtgttcacggcgcgtttgtccgtgaccaggaagtgcatgatgtggtgaatgactggaaagcccgtggtcgtccggaatatatcgataatatcacccgtggtggcgatgacggagaaggcggcagttctgtcagcggggaagatctggatccgttgttcgatcaggcggtacaattcgtcacagaaaaacagcgggtctccatttccggtgttcagcgtcagttccgcatcggttataaccgggcggcgcggatcgtggaagaaatggaagaacagggcattgtcagtgaaccgggccataacggtaaccgcgaagtactggctccgtcctcaaataacttttaatgacgccgctgcctgcaaaggcggcgtctgatttatccgaacgcatcatcaggaatgcatacatgaaaaaggtgtttatcacagcctgccttctggcaggtgtcgcagtcagtgcagcacacgcagatacccgcagtgaccttcagtcacgtctgggaaaagtgaacagtttccatgcgaatttcgcacagaccgtcactgatgctgacggcgcactggttcaggaaggaacaggggatttatgggtgaaacgcccgaacctgttcaactggcagatgagcgcgccggatgaaagtgtgctggtctctgacggcaaaacactgtggttctataacccgtttgttgagcaggttactgccacctggctgaaagatgccacacaaaataccccgtttatgctgatcacgcgtaacgacccggctgactggcagcagtacatggtgagccagcgaggcgacagctttgagctgaaaccgaaaaccagcgacggcaatctgaaattatttactatcactgtaactccggacggtattattcagcagtttgccgccgttgagcaggatggccagaaaagcagctatcagctcaaagggcagcagagtactgatgtgaatatgagcaaattcacctttacaccgccgaagggggttacgctggacgatcagcgtcaatgaggcgtcagtgactaacttttctctcgatttttcgcaaaacgattaccagcctctggccgccagaatgcggccggggacactggaacagtatatcggacagactcacctgctggcagagggcaaaccgctgccgcgggctatccgcgccggacagctccactccatgattctgtggggaccgccgggcaccgggaaaaccaccctggcggaagtgatcggccactatgcggatgcggatatcgaacgcctgtccgctgtgacctccggggtaaaagagatccgcgaagctatcgagcgggcgcgtcagaaccgtaatctggggcgccgcaccattctgtttgtggatgaggtacaccgcttcaataaaagccagcaggatgcatttctgccgcatattgaggatggtacagtcacctttatcggtgccaccaccgaaaacccgtcatttgaactcaactccgcactgttatcccgcgcccgtgtttatctgctcaaatccctgtcaccggaagatatcgaagcggttctgattcaggcgctgaatgattctgagcgcggactgggcggacaaaatatcgtcctgccggatgagacccgtaaactgctggccgaactggtcgccggtgatgcccgccgttcgctgaatgtgctggaaatgatggcggatatggccgaaaccggtgctgacggcaaacgtgttctgaccacagaactgctgaaggaagtcagcggggaacgcagcgcccgctttgataacaaaggcgaccgctactacgacctgatttccgcgctgcacaagtcagtgcgcggctcggcaccggatgccgcactctactggtatgcccggattatcaccgcaggcggggatccgctctatgtggcgcgtcgtctgctggcgattgcatcagaagatgtcggtaatgcggatccgcgcgccatgcaggtcgccatttcagcatgggactgctttacccgtgtgggaccggcggaaggtgagcgggcgattgcccaggcgattgtttatctcgcctgtgcaccgaaaagtaacgccgtttacaccgccttcaaagcggcgatgcgtgacgcaaaagaagggcgggattatgacgtgccggagcatctgcgcaacgcgccgaccaaactgatgaaagaaatggggctcggcaaagagtaccgttacgcccatgacgaaacgaatgcgtatgctgccggagaagtctattttccgcctgaaatgcgtgatacccgttactattttccggcaaaccggggcatggaaggaaaaatcggcgagaaactcgcctggcttgctgagcaggatcaaaatagcccgataaaacgctaccgttaatgccgctgttgcggtaaggtgtgaaatgtaagaataggtaaatggcttaaaacactcagaatgttcatcctgcatacagtgcgggtttccgggcggattaagacgtttcacagttgcgttaataacagccgcactgccggaaagcaggaaaacacttttcgccggttgcatctccgttactgacactcacgttataacaacaagcacaggaatagcatgctcgatccaaatttactgcgtaatgagctggacgcggttgccgaaaaactggctcgcaggggttttaccctggatgtggacacgctgcgcactctcgaagagcgccgcaaggttttacaagttgaaactgaaactctgcaggctgaacgcaactcccgatcgaagtccattggtgaagcgaaagcccgcggtgaagacattgaagcagtgcgccgtgaagtgaacctgttaggggataaactggatgctgccaaatctgcgctggatgaagtgcaggccgagttacgcaccattgctctgaatattcctaaccttccggcagacgaagtgccgtttggtaaagatgacagcgataaccctgaagtcagccgctggggcacacctaagcagtatgatttcgaagtgcgcgatcacgtttcactgggcgaaatgactgatggcctggatttcccggctgccgtcaaactgaccggtgcgcgtttcgtcgtgatgaaaggccagattgcccgcctgcatcgcgctatcgcacagttcatgctggatctgcacacagaacagcacggctatcaggaaatctatgtaccgtatctggttaaccacgatacgctgtacggtaccggtcagttaccgaaatttgccggtgacctgttccataccaaaccactggaagaagaagcggaaaccagcagctatgcgctgatcccgacagccgaagtgcctgtcaccaacctggtccgtgacgaaattctggatgaagctgatctgccgctgcgtatgaccgctcatacaccgtgcttccgttccgaagcgggttcgtatggccgtgatacccgtggtctgattcgtatgcaccagtttgacaaggttgagctggttcagattgtgcatccggaaaaatccatggaagctctggaagaactgaccggccacgctgagaaagtattacagctgctgaacctgccataccgtaaagtgctgctgtgcaccggcgatatgggcttcggttcccgtaaaacctatgacctcgaagtctgggttccggcgcagaacacctaccgtgaaatctcatcctgctctaactgctgggatttccaggcgcgccgtatgcaggctcgcttccgtggtaaagatgataaaaaaccacagctggttcataccctgaacggctccggtctggctgtcggccgtacccttgtggctatcatggaaaactatcagcaggctgatggtcgtatcgaaattccggaagtattacgtccgtatatgaaaggtctgacacatatcggctgattgccggtcagttgtcactgatctgataaaaatcccgccggtgaaaatctgcgggattttttatatccctgaaccatcacagggtattaaacagttttctggtagcttcaaagctttcccggcgcagtgacgggatctcatcactccacagcgggttatggggtaccataaagccatgacattccagtgtatagatcactgtccgcaaaccctcaatatcgtttgccagcagcatttgcggtaatccgtccagcggctccggcaggaaaaaggtggcagggaaattggcccccatctcagaaaaagggttagtggcatccatactgtgatgcacgacttctctgccttccccgcgaaacagaactgcattaatctgtaggatcagcgcggtgattctcggggtgttattaccaaaatgaggatcttccctctccagtaattcacggcggataatctcttttgtcgacccgcggcgcagcagataaggccgtttctccgcaaatgcgtctgcgctgacatccgggttatacggaatatcctgactgccgaaatcttccgtacggggagccacaatcatcaggtcatagtcagcggtcagtggtttattcagctgcggggaacagagaacacgtaccggtgtatcatctttctgcacatagatagcatataaatcattttcagccggtttcgcggtgaataaatgcagatgaccatgaggcgacttgctttcgagtgtgataaatccgtttttatccggctgatggcgggtaagtaatcccatatcaaccagttcgtttatacgcgaaccggttatttgcagattatctgcgatagcatgcccatcccgcaggcattctgcgactttcctgttcatcagttcagtcttatgtttctgtccgcacagtttactgtaaaactgatcaaccggaataaagccggccatcggcccccagttggcacttttccctttgatattaaaatttttggtcgggtaaccggcactgataaggccggttgcggtcgcctcaaccggacggaagctgatcaccagttgctgcttttcagctaatgcctgaagcggggcaagatgctctgcagcgatacctgtctgtgaaatgacggtttgccggtctgttatcagccccgggaatgcggctgtggcatcggaagaaagcgggggcgatgatatttccgggggactgacagaatcgggtaaagaaggtgagccggagatcttgtacatgtgttgattatccattgttgccaaaaggtcaggataaaaaactggcaggaaaaaagtgtcagaaaacaaccggaaacagtataaataagattacaggctgactatattttctgtttaggttgcagatttagttatttccggctctgctaggagatgtattttattggtttttaaatcttaaattttattcttcttcggtttcagacgccgcccggtaagtaaaacaaaagataaacgaacaggggggatacaaataaaaacagcacaccggggtgtgctgtcagaaatagcagtgagataacttaatacatcactttatgaccatagctttccaggatggatttcactttttccatggtctcttttgacggcggcttaacaccatcaagtttgtattcttcattcattgccgtccatttatgctttcctaactcgtggtaaggcagcagttcaatcttctcgatattcttcatatctttggtgaaatcaccgagaaggtgggcggaatgctcatcatcagaccagcccggcacgacgacatagcgtacccaggttttctgattgcgttcagcgagataacgggcgaactgtaatgtgcggtgattggatacgccgactaaattctggtggatgctgtcatcgagttgttttaaatccagcataaccaaatcggttacttccatcagctcgtcaatgaccgggtcataacggcggacaaaaccattggtatccaggcaggtgtgaataccttcttttttacactcacggaaccagtcacgcacgaactcagcctgcagtatcgcttcaccaccggatgctgtcacaccgccgccggatgcattcataaagtggcggtatgtgaccgcttctttcattaactcgtccacagtgacttcctgaccgtcatgcagatcccatgtatcgcggttatgacaatacaggcaacgcatcagacagccctggaaaaagacgataaaacgaatgcccgggccatcaacggtcccgcaggattcaaatgagtgaatacgacctaatactgacatgacaggattactccaaaactgaccagttataataaaggccccgaaacagaggggccttttagtttatgtcattttaataagacagcaaatggttaccgcacaaattacatggattttgtgaatgtacgggtaataacgtctttctgctgttctttagtcagtgagttgaaacgaactgcgtagcctgaaacacggatagtcagctgaggatatttctcaggattttccattgcttctaacagcatttcacggttcattacgttcacgttcaggtgctgaccaccttcgatgcttgattcgtggtggaagtaaccatccatcaggcctgccaggttagtacgacgaacatcgtcatctttacctaatgcgtttggtacgatagagaaggtgtaagaaataccatctttcgcgtaagcaaacggcagtttagcaacggaagtcagagaggcaacagcacctttctggtcacggccgtgcatagggttagcacctggtccgaacggagcgcctgcgcgacggccgtccggagtgttaccggttttcttaccatacacaacgttagaagtgatggtcagaattgactgtgtaggaaccgcgttacggtacatgtggtgtttctgaattttcttcatgaaacgttcaacgatgtcacatgcgatgtcatcaacacgggagtcgttgttaccgaactgcggatattcgccttcgattttgaagtcaacagccaggccgctttcgtcaataatcgggcttactttcgcatatttaatagcagacagggagtcagctgcaacagacagacctgcgataccacatgccatagtacgatatacgtcacggtcatgcagagccatcagagctgcttcgtagctgtacttgtcgtgcatatagtggatgcagttcagtgcagttacatagttagttgccagccagtccatgaattcatccagacgagccataacaacatcataatccagaacatctgtgtgaattggttcgtgtttaggaccaacctggattttcagtttttcgtcaacaccgccgttgattgcatacagcagggttttagccatgtttgcacgggcaccgaagaactgcatttgtttaccgacaaccatcgggctcacgcagcatgcgattgcgtagtcatcgttatcaaagtcaggacgcatcaggtcatcgttctcatactgtacagaagaggtatcgatagacactttagctgcataacgtttgaagttcagaggcagtttttcagaccacaggatggtcatgtttggttccggtgaaggacccatggtgtacagggtgttcaggaaacggaagctgtttttggttaccagagtacggccgtcggtacccatacctgccagtgattctgttgcccagattgggtcaccggagaacagttcatcatactcaggggtacgcaggaagcggaccatacgcagtttcatgatcaggtggtcaacgatttcctgagcttcaacttcggtgattttaccttgttccaggtcacgctgaatgtaaacgtccaggaatgtggaaacacggccgaaggacattgcagcaccattctgagacttaacagcagccaggtagccgaagtaagtccactgtgcagcttcctgagcgttagcagcaggacgggagatatccagaccgtatttggcagccatttctttcatctggcctaatgcacggtgctgttctgcgatttcttcacgcagctggatagtttcacgcagatcttcgccgctttctaatttagcctgcagagaagtgaactgtgcgaatttgtctttcatcaggaagtcgataccgtacagtgcaacacgacggtagtcaccgatgatacgaccacggccgtatgcgtcaggcagaccggtcagaacaccggatttacggcagcggatgatgtccggagtataaacgtcgaacacaccctggttgtgcgttttacggtattcggtgaagattttttcgatttccgggttcatttcgcggccgtaggctttgcatgaaccttcgatcatacggataccaccgaacggcagcattgcacgtttcagaggtttttcagtctgcagaccaacgactttttctaaagactggtcgatgtaaccggcatcgtgagaagtgatagtagacggcagatcagtgtcaaaatcgataggagcgtgggtactgttttcgattttgatgccttccataactttcgcccacagagcagttgttgcctctgtagcgcccgctaagaaagactcatcgccttcatatggggtgtagtttttctggataaagtcacggacgttaacttcctgtgaccagtcacccagattaaagccttgccatgctgaagcgaatttttcatttaattctgacatgatactttaccttttaacaatggaacttagaaattcagtcgtgataaacagagattaatgcttctggtcaccgcgtaaatgaatcagccaataagtcagacctactaaaactgcaccaccaataatgttgccgatggtgaccggaatcaggttgttaatcacgaaatcagaaactgtcagggacggaaactgttcaggcgacgaaccaaccatagtccagaattcagaaggtgcaaaatttttaatcgcaatccccatcgggatcataaacatattggcgatactgtgctcaaatccgctggcaacaaacataccgataggtaagactaaagctaaaagtttatcggtcagactacggcctgcgtagctcatccataccgccagacaaaccattaagtttgccagaatcccgagacagacggcttcaataaaggtgtgatgaagcttatgatccgctgtttgcaggatatttaatccccacagcccgtcggctgccatatactgtccggcgtaccagatgagggcgacaaagaagagggcgccgaccaggttaccgaaatacacgcgggtccagtttgcaaacatctgtccccaggtgatacgcccggtggcttttgccacgctggttaatacggtggaggtgaataagtcagccccgcaaaccacaaccagcatcagaccgagcgagaaacataaaccaccgataagtttagcgataccaaaaggcactatgcctgcggtaccggtggtggctgtaatataaaagacaaaacctactgagatgaatattcctgccataaatgcagataagtatgtgatgtgaggggctttcgttgctttatagacacccacatcgtctgcaacatgtgccatatcggcaggagataataaattaaaaagtgcgtcagttttcataatgctaactgtctcttgattccaaataattatagcacgcaatgatagtaacaaagggtgaaaaaattaaacttgatgtggatcataaaggcgttcaagagaatcgtcaaataccctgaaaaaagttgaaaaatcaatgtaagtttatgtatataaaggaaaaacaattttttaaaaattgtaatatatttttattttttgttttttatttaattaaagtaaaaaatcaggttaacttgtcgtttttgtgttacttaaaacgaacaaattaacctaatatttacgtttattgctatttacgacgattaaatcgcatttttatcgtttggccaaaaatgcgcttttgctttttgcagtttttcataagctgccagcagtgcctgatgagcaggaaatgccgttaaattattatctgatgcacataacccgaagaaacaatttttgccgttcagggcatccagcgccgcattcagggtttcctgaccatacatacgggcaaacgccggcaggtactgttctgtgtcccgctccggctcctgcgttaacagcagcagggtatgcagacagcggtaatagtttgcccgtgcggcactgagaacactggcgttgaagtcctgtgtccactccacccaggccagcgcctgatcggtatcaccaccggccagtgccagcatggatttcagctcaccgatgcgcagggtggaccagccgttatctttaccggcggcaatgcccagcaattcacggacacgggtaaaatcgtcatggccttcttcatccagctgcgccagcagagagagataatcttcctgacggtaacggctttccggcagcgcgagaatggtttcacgcagatgaatacccatggcgttattggccatatgcaaatcttccaccggatagatatctgacatgcccggcaccaggatacggcaggcatacacaccgagatgctcataatcggcaatatacacttcgtggccggatgccgcgaactgtgccatcagtgtggtgaattcttcttcggtggtgccgcggaactgccagtcagcgaaatcataatccgcatcctgtttaaacagatcccagctgatcaggccgcttgaatcaataaagtgagtttccaggttggtctgatccgccacttcctcgtcatcaaaggtcggtgcagtgaaaacatcgaggtctttcaggctgcgtccctgtaacagctcagtgacagtccgctccagtgcaacaccgaaatcaggatgagcgccgaaagaggcaaaacaggtaccgttggccgggttaaacagcaccacacagataaccggatactgaccgccgagagaggcatcaaaacagaagatcgggaaaccttcgctttccagggtgcggattgactcagtgacctgcggataacgcgccagcacctcttccgggatcgccggtaagctgatgcgctcagcaataatgcggtttttcacataacgttcaaagacttccgataatccctgcacgcgggcttcattgcgggtgttcccggcggacatgccgttggacacatacaggttggcgacgatattcatcggaatatataccgttttgccgtcagactggcgggtaaacggcagggcgcagataccgcgctcctcattggaggattgcaggtcaatcagctggctgccctgcaaatcattttccggatcataataatcgcgcagatactgatcgagaataccgtccggcagtgagtcatcctctgtcagcgggaaccatttctcatccggatagtgaacaaactccccgttggcaatggtttcgcccagccagaaatcagcaaaaaagtagttggtggacagacgctcaaaatactcgcccagggcggaggccagcgcggcttttttagtggcccctttgccgttggtaaagcagagcgggcagtcagtatcacggatatgcacggaccagacgttcggcaccgggttgagccacgaggcttcttctatattgaaacccagttgctgcagtttctgctgaaaacggctgatggaatcttcgagagcggcatctttgccgggaataaaagtatgtgtttgcgtcatgggatccacaattgctgtaacggcccgctgcacgcggactcaggaataccggggaagaaaggcgcacataatacggatttttcgtgtcagcggctacctttgtgaatgtaaagttaccaccgggttattccgctgtatttccgccgtctgtcatgaatccccggaaatacattatataatatcccaatctgatagtcagaggcagtcagatattctgccgggcgacaaaaagggtttaccgcccatcatgcaataagcgttgcagcgaagggtggggagtgataaaaccgacagacagggcgtattcatatgatggatatacagggcattaatttacagatagggtgaggtcaatgagtcaggtatataactttagtgccggtccggctatgctgccggtagaagtgctgcgccgtgctgagcaggaactgtgcaactggcgcgggctcggcacctcagtcatggaaatcagtcaccgcagtaaagagtttatgtcggtggcaaaggaagcggaaaataatctgcgtcagatcctcgcggtgccggataactataaagtgctgttctgtcacggcggcgcacgcggacattttgccgcactgccgatgaacctgctgggcgagaaaaccaaagcggattatgtggtgggcggatactgggcggaatgtgcggcagaagaagcaaaaaaatattgcacaccgaacattattaatgtcagaaccgaatcggaagacggtatcggcgtgaagccgatgggcgaatggcagctcagtgatgatgcagcctatgttcactactgcccgaatgaaaccattgatggtatcgctatccatgaagagccggatttcggcgataaaatcgtgattgcggattactcctcggccatcctgtccaaaccgctggatgtcagccgtttcgggatgatttatgcgggcgcgcagaaaaatatcggcccggccgggctgaccctggtgattatccgtgaggatctgctgggcaaagcgcgcagagaaaccccgtccatcctcgactataccgtactgagtgaatgtgactccatgttcaacaccccgccgacctttgcctggtatctctccggcatggtctttaagtggctgattgaacagggcggtttacaggaaatcgcccggatcaactatgataaagcacaactgctttactctgcggtggatcacagtgatttctatattaaccgtgtggcggcggccaaccgttccctgatgaacgtgccgttccagatgtctgatccgtcactggacagcaaattcctcgccgaagcacaggcacagggactggtctccctgaaagggcacaaagtcgccggcgggatgcgcgcctccatttataatgcgatgccgtatgaaggcgtgcgcgcactggctgaatttatggcggagtttgaaagccgtcacagctgattttttgcagacatttttccgggaccgggtaagcatccggccccgtttttcgtttttatgtttacacaccggagaataacttcgtatggattccctgacgttacaacccatcgcccgcattaacgggacgattaacctgcccggctccaagagtgtctccaaccgggcactgctgctggcggcacaggcagcgggcacaacacgccttatcaacctgctcgacagcgatgatatccgccatatgctcagcgcactgcgggaactggggatccgttatcagctttctgacgacaaaaccgaatgtattgtggaaggtcagggcaaaccgatcagcggatttaaaggtattgagctgttcctcggcaatgccggaacggcgatgcgcccgctgacggcggcactgtgtctcggggataatgacattaccctgaccggcgaaccgcgtatgaaagagcgcccgattggtcatctgaccgatgcactgcgccagggcggcgcacagattgatttccctgagaatgacggttatccgccgctgcggatccgcggtggttttaccggtggccgtatcagtgtggacggttccgtatccagccagtttctgaccgcgctgctgatggccgcaccaccggcagagaatgacaccgaaattaccatctcgggcgaactggtctccaaaccgtatatcgatatcacgctggcgatgatgtcctcttttggcatcacggtggtgaatgaagattaccggcgtttcctgatcaaaggaaaacagcagtatcagtccccgggtgaatatctggtggaaggggatgcgtcatccgcctcctatttcctcgcggcggcagccattaaaggcggcaccgtgcgggttaccggcatcgggcgtaacagtctgcagggtgacacgcaatttgcggcagtgctggaaaaaatgggcgcgaaagtgacatttgcggacacgtacattgaatgtacccgcgatactctgcacggcatcgatatggatatgaacgccatcccggatgcggcgatgacgattgccaccactgcgctgttcgccgaagggacaaccactatccgcaatatctataactggcgggtgaaagagacagaccgtctcagtgcaatggcagctgaactgcgtaaagtcggcgcacaggtggaagaggggcatgattacattcaggtcaccccgccggcaaaactgcagcatgcggaaattgaaacctataacgatcaccgcatcgccatgtgtttctcgctggtggcactgtcagacaccccggtcacgatcctcgatccgggctgtacggcaaaaaccttccccggctacttcagtgagctggcggcactgtcagaataaaaaaacgctgttctgcgcgcagggcgtttcctctgctgtcacagatgcgtataatacgggcatcttttttcaggcggccgttgtgacggccgccggactgcgacaggagagcgcgcatggcagtatatgttccggtcattaccattgacggcccgagcggcgcgggcaaaggcaccctttgtcacgcactggcaaacgaaatgggatggcatttactggactccggcgcaatttaccgcgttctggcactggcggcactgcatcatcatgtggatatcacctcggaagatgcactggttccgctggcggctaatctggatgtgaaattcctggcaaaagacaccggccctgagacaattctggaaggtgaggatgtcagccgggctatccgtcaggaagaagtgggtatgacagcctcgcaaatcgcggcgttcccgcgtgtccgtgaagctctgctgcgccgtcagcgcgcattccgtgtggcgccgggcctgattgccgacggccgcgacatgggcacggtagtattcccggatgccccggtgaaaattttcctcgacgcgagtgcgcaggagcgcgcccaccgccggatgaagcagttgcaggacaaaggctttagtgttaattttgaccgccttcttgctgagatagaagagcgtgatttccgcgaccgcaaccgtgcggttgccccgctggtggctgccggcgatgcgctgattctggactcaacaaccatgtcaattgacgacgttattgccgaagctcttcgttatacgaaggaaaaactggcagaaacggcggaatgataaacaaaatttgcggaaaatctgactgaaaacgtgttttttagtaggtttctgtattcgtttttgtttataatgttaagttgaagttttttaccggcagagaacaaggcaaagaagcagttttctgccacccctttgtgacaaggaatgttgcaaggtatgtgaaacaaccccattcggccggatgctaaatggacgttaatacttaaacacttgaagatcaaacatgactgaatcttttgctcaactctttgaagaatccctgcaggctatcgaaacccgtccgggcgctatcgtccgtggtactgttgtcgctatcgataaagacgtagttctggttgacgcaggtctgaaatcagaatctgctatcccggtagaacagttcaaaaatgctcagggcgagctggaaatccaggttggcgacgaagttgatgttgctctggacgcagtagaagacggtttcggtgaaactgttctgtcccgcgagaaagcaaaacgccacgaagcatggctgatgctggaaaaagcatacgaagaagctgaaactgttaccggtgttatcaacggtaaagttaaaggcggtttcactgtcgaactgaacggcatccgtgcgttcctgccgggttcactggttgacgtgcgtcctgttcgtgacaccacgcatctggaaggcaaagagcttgagttcaaagtaatcaagctggatcagaaacgcaacaacgtggttgtttcccgtcgtgcagttatcgagtcagaaaacagcgcagagcgcgatcagctgctggaaaacctgcaggaaggcatggaagttaaaggtatcgttaagaacctcactgactacggtgcattcgttgatctgggcggcgttgatggtctgctgcatatcactgatatggcgtggaaacgtgttaaacacccaagcgaaatcgtgaatgtcggcgacgaaatcactgttaaagtgctgaaattcgaccgcgaacgtacccgcgtatctctgggcctgaaacagctgggcgaagatccttgggtcgcaatcgctaagcgttaccctgagaacacccgtctgaccggtcgcgtgaccaacctgactgactacggctgcttcgttgaaatcgaagaaggcgttgaaggcctggtacacgtttctgaaatggactggaccaacaaaaacatccacccatctaaagttgttaacgtgggcgacgttgttgaagttatggttctggacatcgacgaagaacgtcgtcgtatctccctgggcctgaagcagtgcaaatctaacccatggcagcagttcgcggaaactcacaacaaaggtgaccgcgttgaaggtaaaatcaagtcaatcactgacttcggtatcttcattggtttagatggcggcatcgatggtctggttcacctgtctgacatctcctggaacgttgcaggcgaagaagcagtacgtgaatacaaaaaaggcgacgaaatcgcagctgttgttctgcaggttgatgcagagcgcgagcgtatctctctgggcgttaagcagttagctgaagatccgttcaacaactacaccgctgttaccaagaaaggtgctatcgtcaccggtaaagtaactgcagtagacgctaaaggcgcaactgttgagctgatggatggcgttgaaggttacctgcgtgcatcagaagcttcacgcgatcgcgttgaagatgctactctggttctgagcgttggtgatgaagttgaagctaaatacactggtgttgatcgtaaaaaccgtgtaatcaacctgtctgtacgtgcaaaagacgaagcggatgaaaaagacgctatcgctactgtgaacaagcaggaagaagctggcttctctaacaacgcaatggcagaagctttcaaagcagctaaaggcgagtaattaagcagcagcaggccgcgcaagcggtctgcttttatgataatcagggtagtccaggaggttatatgaccaaatctgaactgattgagaagctggcaggccaacaatctcatcttccggctaaagttgttgaagaagcagtaaaagagatccttgagcatatggcaaatacgcttgctgacggcgaacgtattgaaatccgtggattcggcagtttttctctgcactaccgtgcaccgcgggtaggtcgtaacccgaaaaccggcgaacaggtggaactggaaggtaaacacgttcctcacttcaaaccgggcaaagagttacgcgaccgcgcaaatatctatgcttgattattgacagagataataaaaatgacgccaccggcgtcattttttttgcagcaaacattaaattatcattattataaaaatgttaatattgtattaataaattatggttgtgtaaggttctggtgttggcaagttgaattcgtttattaataataggttaccggtgacatcatattcagttcgccataaaatactattggaaattagacagtgtttataattaagcaaataattgtgagttgactcgcataaaataattgattacttgtatgcctgaaatataaattcgtgacgacacgcatttttctattatcgtaataacacgtgatacccgtcataacataataccggcctgtttaccttcccggtgagtaatatgtctgttatggctgtgatgaaatatctgtttccccgtccgttgccgctctggcacgctgcggctgctgttgtgaccgggcatatgccgctgttgctgattccgcggttgttgttaccggcagaaagccagctgttattcactggtatttgtttgctttttcttatccgcaccaggctgagtttttttatccgcattgttgccggtacttttctggcagtaaatattcatatcggtaatacattatcactcttttccgctgaactacccgataatatcgatattatgatccatgatgtcatgattaactcatctgactattattccgtcagagggcggattattaatataaataataaaatgtatgatgatactgtttttattaatataaaaataaaaggttcatttaaaccggcatgttccggtgaagtctggcgtatatttcgacctgtactgaggccggtacacggtcagttaaatgaaggacagtcaaaccggcagcaatatttactgtcagagcgggttttgttttctctgacgccgggacgcagtgaaaaactatcttcagactgcaatcagcgtcagaaaatgattgcgacataccttcccgcaatggataacctgccgcataacggactgatggcggcgctgttatttggtgaacggcgcggcatcaccgcagagcagcgcagactggtgcaggaaaccggagtggctcatgtggtggctatttccgggttgcatatcgggctggcggcgttatggggatggtgggccgggcggttattgttgctgctgttaccgctgcgtatggtgacacctgttattccgtctgtgctgtcagtctgtgccgctgttgcttatgtctggctggccgggtttgcggttccggcctgccgggcattgtctgcgctgctgttgtggcatctgctgcgctggcggcattaccatctgccggcgtatcagtttgttatgatcagtggcgctctgttgctgctggcggatccgctgacaattttatccgccggattctggctgtcttatactgcggttaccgcattgctgttctggcatcacaccggcgttttctcccgcagtaatgtattcatcccgctgacaccttttgcccgcctgtggcgcaatatcaggttgttcctctcttatcaatgcggattatttttgttactgctgccggttcagggctatttctttggcggcgtgaatattctgtcgtttctgagtaatctgtgggtggtaccggtgatctcctttctgacggtgccgctgctgtttgccgggttattgatcgggcccgcactgccgctggcggatttctctctggcgctggcattatggccgctgccgtttctggcacaagggtggatggttaccggacacatcgctctgatatggataccactgatgtgggcggctgtttatatcatcaggctggatatgtggcggcagcacccgttgctgctgccggggatggtgttcagttgctgtctgtatctgcggaaaactccgctgcctgaatggtcggttaccgtactggatatcgggcacgggctggcggcggtggtgataaaagacggcagggcggtcgtgtatgataccggcaaccgcttcgggacacgggatgacgggctgcgtaccgtattgccttatctgcgttatcaccgcctgaccccggactggattatgatcagccatgaccaccgtgaccacaccgggggactgggctctctgcgcagtgcttatcctgccgctgtggtcaaaggcaatattccgcaggctgatacaccctgccgccgcggggagcgctggctgtggcagtcattgtattttgaggtgttatggccggacgaaaaatatcagctgagcaaaaatgacggctcctgtgttatccgcatcagtgacggtaaacatcaggttttgctgaccggggatatcgaaaaacaggcagaaaaacagctgatcaagtataaagatgaactctccgccacagtactgcaagttccgcaccatggcagcaaaacctcttcatcagaattttttattcgtgcggtaaatcccgctttcgcactggtttctgttgcgcgctatagcccgtggcgtctgccttctgataaagtacgccgtcgctatcacaatctcggcgtgcagtggcatgatactgcgcacagcggccagatttctgtgtccttttttgctgatgaggtatccgtcgcgacttaccgtacccatctctccgcccgctggttcagcgcatggtttggagatcagccggtaaacgggtaatataggcagctaatttttagtattggtaaacgcaataatgaaagatattgatatttcaacccggcaaacattccgccggttatggccgacaatcgcaccgtttaaaacaggtatcatcgtggcggctattgcgttagtcatcaatgcgggcggcgatgcatttatgctgtcgctgctgaaaccgctgcttgatgaaggtttcggcactgccgacaatgattttctccgtatcatgccgctgattatcctggggctgatgctgttacgcggtatctccagttttgtttcaggctactgcctctcctgggtgtccggcaaagtggttatgactatgcgccgtaacctgttccggcatatgatgggcatgccggtttccttctttgatcagcaatccaccgggacactgctctcccgtatcacctatgattccgaacaggtggcttcgtcttcttccggcgcactggttacggtcgtccgtgaaggcgcttatattattgcgctgttcagccttatgttttacaacagctggcagctgtcgctgattctgattgttattgcgccgattgtggcttttgttatccgcaaagtctctgtccgcttccgcgaaatcagtaaaaacatgcagagcggcatgggacaggtcagcgccagtgctgaacagatgctgaaagggcataaagaagtgctgattttcggcggtcagaaagtggaaaatgatcgtttcgataaagtcagcaaccatatgcgccgccagggcatgaaactggttaccgcatcatctattgctgacccgattattcagatcattgcctcctttgcgctggcatttgtgctgtttgccgccagtttccctgaaattaaagaagcgctgagtgccggttccattacggtggtcttctcctccatgattgccctgatgcgcccactgaaatccctgaccaacgtgaacgcccagttccagcgcgggatggcggcttgtcagacactgtttgttctgcttgatatggagcaggaaaaagacaccggcaccaaagtgctgaaagatgccaaaggtgatgtggcgtttgagaatgtgactttccgttatcaggggaaagagaacccggcgctgaaaaatgtgtcgttcactattccgtcaggcaaaacggtggcactggtcgggcgctccggctccgggaaatccaccattgccaatctgatcacccgtttctatgaaattgaaagcggacacattacgatcgacggcaatgatatccgcgattacacgctggcatcactgcgcagtcaggtggcgctggtgtcgcagaatgttcacctcttcaatgatacggtcgcgaataatatcgcttatgccacagaaggtaagtacacccgcgagcagattgaaaaagccgctgaaatggcttatgccatggactttatcaataagatggagaagggactggataccgaaatcggtgagaacggtgttctgctttccggtggtcagcgccagcgtattgcaattgcccgtgcattgctgcgtgacgcaccgatccttatcctcgacgaagcaacctcggcactggatactgaatctgagcgtgcgattcaggccgcgctcgatgagttacagaaaaaccgtacctgtctggtgatcgctcaccgcttatccaccattgagaaagcggatgaaatcctcgtggtgcaggacggcgaagtgcaggagcgcggtacgcatgatgaactggtgaaacagccgggtatctatgcacagctctataacatgcagtttggtcactaagcggcactgctgatgatcgataagatttggtccggccgctcaaagctttactggctgcttctgccgttctcgtttttgtacggggcggtgagcggtctgcggcgtctgctgttccgctgcggactgaaaaaatcccgccgtatgccggtaccggtggtggtggtcggtaacctgactgccggcggtaacggcaaaacaccggtggttatctggttgacagagcaactgctggcccgcggctaccgtcccggggtggtttcccgcgggtacggcggtaaatcggatcattatccgctgcttatcacgaaagacacgacgacagcacaggccggtgatgagccggtgctgattgcccgccgtaccggtgtgccggttgcggtcgcgccagaccgtgccgcagcggtagaagctattttgcagcatgcaccggtggatgtgatcatcaccgatgatggtttgcagcattacgcactacagcgcgatatggaaatcgtggtgattgacggcgaacgccgtttcggtaacggctggtggctgcctgccgggccgatgcgggaacgggcagggcgtctgaaacaggtggatgcggtgattgtcaacggtggtaccgcacaacccggggaaaccgctatgcaactggtgccgggagaggctgttaacctggctgacggcacccgtaaaccggcggctgaaatcggtgagtgtgtggcgatggccggtatcgggcacccgccgcgtttttttgccacgctgaactccctcggcgtgacaccggcacagtgtattgcgtttccggatcaccagtcttacagccctgaacagctttccgcactgataaaacccggtcagtcactcctgatgacagagaaggatgcagtgaaatgttttgccttttctgcaactgactggtggtatttaccggtcagtgccgccattcccgcaaaatccgccgatttaattctggataaagtcatatctcacataaaaaatgcataaagggacttgcgctttttatctgaatatggcttaatcaaaaaagttgtatttctgtgatgtatttcatatctcactgtgcaaccaatccgcgtgtcaacacatattctgatcccgctgtcataattttttcacaccaccttgttaatcttgtggtgcggatgaccggatcccgcggataaacggtatgttttgcagcaggtgtctgaccggctgcaaatcagaataaaaaataataactataatgttttgctcattaccgggtggctgttcgcaaagagagcacccgtgttgcccggccggagcagacataaccagcgatggggtgtataccattcctggtgatataaaaggagttaatactatgtctaaacaattacaacttggccgcgttaaatggtatgacgcgaaagaaggttacggtttcatctccccggttaacggcggcgatgatatctgggtaacccgtaacgggatcgccaattcccgtaacaaattactgtgcgaagggcaggaagtggaattctcactgacccgcggcagttatggtattgcagcgaacgatgtgatcgcgctgtaatatgggtaaaaacgcgattatctcagtgatatcgcaacaacagagttaacggtgagaccgggcttatgttattctgagccaacgtttttatctcattgggggacgtatggatcaccgtttactcgaaatcgtggcctgccctgtttgccacggcaaactcagctacgacaagcaaaatctcgaactcatctgcaaaggctgccgtctggcctatcccgtccgcgacgatatccctgtcttattagagaatgaagcccgcgaattgccggtctcagaaggataatctccatgtttacagttatcattcctgcgcgttatgcctccacgcgtctgcccggtaaaccgctggcggatatctgcggcaagccgatgattgtccgtgtgatggagcaggcaaaacgttccggtgccgcgagagtcattgtcgctactgacacacaggcggtatttgatgccgtgattgcagagggcggcgaagcctgtatgacgcgcgaagatcatcagtccgggaccgagcgcctggcggaagtgattgatcactaccggtttgctgatgatgagattatcgtgaatgttcagggggatgagccattaatccctgacagtattattgcgcaggttgctgaaaatctggcagccagcgaagccggtatggccaccctggcggtaaaaatcacctcagcggaagaagcctttaacccgaatgcggtgaaagtggtgatggataaacagggctatgcgctctatttctcccgggccaccattccgtgggatcgcgagcgtttcatgcacagccgtgacagcgccggtgataatttcctgcgccatatcgggatttacgcctaccgcgccgggtttatccgccgctatattcagtgggaaaccagcccgctggagaaaatcgaaatgctcgagcagctgcgtgtactctggtacggtgaaaaaattcatgtcgcggaggcatccgaagcgccgggcaccggtgttgataccccggaagatcttgaaaccgtgcgcagattgtttgccgcccgctgagaaatatcagtcataaacaaaaacgcgggtcacttctgaacccgcgtttttgttgtcttctattcctgtccttcattatctgacgattttactgactgccagagccgccccagcccttcataccagacccgctcactgtgtgatagatagtacgcggaaggaatggttttttcccagctgtgcagcggggtggtgacggccagctggttagccggtgccgggatagggtgcaggccgcgcgcatcaaagaaggctttggcgcgggtcatatggttagcggaggtcaccagcaggaacggtgcatcgtccaccacttttttcacttcggcggcttcctcttcggtatctttcggcaataccagcggcagtgtgcgttcagcagggatccccagtgactgcgcaacttgcgctgcggcctctgcgctgctgatactgtttgcgcccggcccgccggtgaaaatcagcgtcgcctgcgggtaacgcagtgcaaggcgcacaccttcggtgacgcgcggcagactgttactgatcaggttggcggaaggtgaccattccgggttataggtaaagccgccgccgagcaccacgatatagcgcagttcctgttgctgaacttctgccggggtaatgagctcataacgtttttcatacggtttttctgttgtcagcagcagagcatccgccaccggttgcaggctgagcagcaccagcccgagccagctcacggtgatcagggttttaccggttttctgccatcgggaaaaccacagcagcagtaatccggccaggatcagcaggagcataaacggcagcggcatcagaaaaccgccgaggtattttttcagggcaaacagcatgagcgcaccttaaatatgattgatttatcaccggttaacggcaggagtctgcacaaatcgggtgacattagacacgtctgtgacacaatagttaccgactttgcatattgcactgctctgcccggcaatacaattgaagatagccggattgcgcgggaaaccgccgcagactgacccgaaatatcccccggaactgaacacaggttttcatggttgatcgtaattttgacgatatcgcggagaaattcacccgcaatatctatggcacaacaaaagggcaaatccgcgaagcggtggtctggcaggatctggacgccttactgacccggctgaaaccgggtccgctgcgcattctggatgcgggcggcggtgacggttttttctcccgccgtctggctgcgctggggcatcaggtggtattgtgcgacctgtcagaagagatgattgcccgcgcacaacaggccgcgctggatgacggcgtggcagaaaatatgtcctttattcattgtgcggcacaggatatcgcacttcacactgaaggggcgtttgatctggtattatttcatgccgttttggagtggatcacagatcaaaaaggtgcaattgaagcactgaccgctataatagcgggcggtggtgcattatcgttaatgttttacaatgcgaacggacttgtgatgcgaaatgcgatattaggcaattttcatctggcaaccccggaaattcagcgccgccgcaagcgttcgttatcgccgcagaatccccttatgccggaacaggtttatcagtggctggatgattgtcgtctgacgattgaggcaaaaaccggcgtgcgggttttccatgattatctgcagagccgccagttacaaaaccgtgatttcccggcgctgctggcactggagcaacgctattgccgtcaggagccttatatcagcttaggccgctatattcacgttatggcacgaaaaccgatcagaaggatggacaatgagtgagtttacccaaacagtcccggaactcgtggcatgggcgcgaaagaatgatttctccatcgcgctgccgccggaacggctggcttttttactgtctgttgcggtgctcaacagtgagcgcatcgacggtgaaatgagcgagggggaactggtggatgccttccgcgaagtctgcaaaggctttgaacagacaacggaatctgttgcggtccgcgcgaacaatgccatcaatgatatggtgcgccagaaaatatttaaccgctttaccagtgatatctttgagggtaatgcgatttaccggctgaccccgctcgggatcggcatcagtgattattacatccgtcagcgtgaattttcctcactgcgtttatccatgcagctctcgattgtggccggtgaactgagccgcgcggcagatgccgccgaagagggcggggatgaattccactggcaccgtaatgtgtttgccccgctgaaatattccgtggcggagatcttcgacagcattgatatgtcgcagcgcgttatggatgagcagcaaaacggcgtcaaagacgatatcgccaaactgctgaatcaggactggcaggccgcgattgccaactgtgaacagttgctgtcagaaacctctctcacactgcgggaactgcaggatacgctcgaagccgccggtgacaaattacaggcgaacctgctgcgtattcaggatgccaatatgagtgccgccaccggctccgaactggtggataaactgatttttgatctgcaggccaagctcgaccgcattatcagctggggccagcaatctattgatttatggattggttatgaccgccatgtccataaatttatccgtaccgctatcgatatggataaaaaccgtattttctcgcagcgtctgcgccattctgttcagcactattttgactcgccgtgggcccttaatgtggctaatgcggagcgtctgctggatatgcgtgacgaagagatggcactgcgtgatgacgaagtgaccggggaattaccgccggatctggaatatgaagagttcagcgaggtcaacgaagagcttgccgccatgatggaaactgcgctggctgtgtataaagcacaggcgaagccgctggatctgggcgcagttctgcgtgattacctcgcgaaatatccgcgcagccgccagttcgatgtggcacggattatcgtggatcaggccgtccgcctcggggtggctgatgctgatttctcaggcatcccggcagaatggtcagcaattaatgaatacggagcgaaggtgcaggcacatgtcatcgacacatattgaacaatttatgtcagcaaagctggctcaggcacttgccaacaacctttttccggaacttgacagccagttgcgcgcaggccgccatatcggcgtggatgatctggataatcatgcctttctgatggatttccaggatgaactggaaggcttttacgcccgttataacgtggaactggtccgtgcaccggaagggttcttctatctgcgcccgcgttccagcacactgatcccgcgctcggtgttatccgaactggaaatgctggtcggtaaagtgctgtgctatctgtatctcagcccggagcgtctcgccaaccagggtattttctccacggcagagctctatgaggaactgctgtcactggcggatgaagccaaattactgaaagtggtgaataaccgctccaccggctctgacctggacaaacagaaattactggaaaaaacccgaggtgcgctgaaccgcctgcgccgcctgggcatgatcacgtttgtctctgcggataacagccagtttgtgattgccgaatccgttttccgcttcggggcagatgtccgcagcggggatgacccgcgtgaggcgcagctgcgtcttatccgtgacggtgaggcccaatccctgacggaagatgaaaaatacccgcgccctgaggatcaggacgatgataatgaagaatctgataatgacaacgcgacggatgaagcggaggatgaagaatgattgaacgtggtaaattccgctcgctcacgttagtcaactggaacggcttttttgcgcgcacttttgatctggatgagctggtcaccaccttgtccggcggtaacggtgccggtaaatccaccaccatggcggcctttattaccgccatgatcccggatttgaccctgctgcacttccgtaacaccactgaagccggggcaacatccggttcccgtgataaaggtctgcacggtaaactgcgtccgggcgtgtgctacgccatgctggatgtggtgaactcccgccatcagcgtgtgctggtgggggtgcgtcttcagcagattgccggacgtgataaaaaagtcgatatcaaatcctttatgattcagggattaccgacacagtattccccgacacagattgtcagcgaacagctgagtgaacgccaggtgcgggttctgccgctgaatgacctgaaagcccgcctggatgatatcgaaggtgtgcatttcaaacagtttaactcgattactgattaccattcggttctgttcgagctgggtgttatcccgaaacgtctgcgttctgcaggggaccgcagcaaattctaccgcctgatcgaagcttcgctctacggcggtatctccagtgctatcacccgttccctgcgtgactatttactgccggagaacagcggggtgcgcaaagccttccaggatatggaaggggcactgcgcgaaaaccgtatcacactggaagctatccgcgttacccagtctgaccgtgacctgttcaaacacctgatcactgaagcgaccgcgtatgtttctgcagattatatgcgtcacgccaatgagcgccgtgtgtatatcgaccaggcactctctgtgcgccgggaactgctcggcagccgcaaacagctgatcagcgaacagttccgtcaggtggaaatgtcccgcgagctggcggagcagacggcctcatccgccgatctggaaacggattaccaggcagccagtgatcatctgacactggtgcagacggccatgcgtcagcaggaaaaaattgaccgttatcaggctgatgtcgaagagctgacattccgtctggaagaacagactgaagtggcggaagaagccgcagaacagctggcggaatatgaagaacgcaaccatgttgcggaagaagaagtggatgagctgaaaagccaactggccgattaccagcaggcgctggatgttcagcagacccgcgccattcagtatcagcaggcattacaggcgctggaacgcgccaaagcggtgtgtcagctgccgcagctggatattgattcactggatgaatggctggaaaccttccgcgcccgcgaagagcaggcaaccgaatccctgttagtgcttgagcagaaaatgagtgtggcgcaggccgcacacagccagttctctcaggcctatgaactggtgaaatcggtggtcggtgaagtcagccgcagtgaagcttaccagaccgcccgtgaattattgcgcgaactgccgtcacagcagatgatggccgaccgcgtccagccgctgcgccagcagttatccgaactggaacagcgtctgcacagccagcacaatgcgcagaaatcgctggatgatttctgcaaacgcatcgggcagcaggttgaggcggacgggctcgatgagatgctgatgacccttgaggcgcagcaggaaagcctgagtgtcagtgtcagtgaaagcagcgagcgccgtatggaaatgcgtcagcagactgagcagctgaagcagcaaatccagtccctgaccgtcaaagccccggcgtggctggcggcgcaggaagctctgacgcaattgtgtgagcagtctcatgagacgttcaccagcgccaatgatgtcactgaatatatgcagcagttgctggagcgtgagcgcgaagtgactgttgagcgtgatgaaatcgcgctgaaaaaagcacagctggaaaaagatattgaacggctcagtcagccgagcggcgcggaagatggccgtatgcttggcctggcagagcgtttcggtggtatattgctgtcggaaatctatgacgacatcacgattgatgacgcaccgtatttctccgccttatacggcccggcgcgccatgcgattgtggtgccggatctcagcgccgtgcgtccgatgctggatgccctcgatgattgtccggaagatctctatctgattgaaggggatccgcaatcctttgatgacagcgtcttcaccaccgaagagctggagcgtgcggtgctggtgcgcagcaccgatcgccagtggcgttactcccgcttcccgtctgtgccgctgttcggccgtgcggcgcgggaaaatcagctggcagtgctggaacatgaacgggatgagctggcagaacgcctggcgacactctcttttgatgtccagaaaatgcagcgtgctcatcaggcattcagccgttttgtcggcaaaaatatctcagtggcctttgaggctgacccggaagcggaaatccgcacactgaatcagcgccgtaatgagctggagcgcgagctggcacagtttgaggatcagactgccgttgcccgtcagcagtatgcgcagatcaaagaaaatctgagcatccttaaccgtctgatcccgaataccgctctgctgcttgatgaaacactggcagatcgcgcggatgagatccgtgatgcgctgacggatgcacaggaatccgcccgtcatattcagcagtacggtgcagcgctgcgcaaactggagccgatggtagctgttctccagagtgatccggagcagcatgaagctctgatccgcgattatgaaaacgcgaaacaggtgcagcagcaggcccgtcagcaggcgtttgccctggaagaagtcgcgcagcgccgtcagcactttaattacggcggatccgccggcatgctgacagaaaatgccgatcttaatgacaaactgcgtcagcgtctggaacacgcggagtctgatcgtgcccgtacacgtgagatgctgcgccagcagcagaccaaatgcgcggagttcaatcaggttctggcctcactgcgcagctcgtatgaaaccaaatcggacatgctgcgcgaacttgagcgcgaaatgagcgaaattggtgttcaggcggatgccaatgcggaagagcgtgcccgtgtgcgccgtgatgaactgtacaaccaggtcagccataaccgcgcccgtatcaatcagctggaaaaacagctggggatcggcgagtcggaaatggataatctgcaaaaacgtctgcgcaaagcagagcgcgattaccagcagctccgcgagcaggtcgtgaccgccaaagcgggctggtgtgcggtgatgcggatggtgaaagaaagtggcgttgagcgccgcctccaccgccgtgagctggcttatgaagatgcggacacactgcgttccatgtcggataaagccctcggtgcactgcgtcaggccgtggcggataacgaacatctgcgtgatgcactgcgcctgtccgaagatccgaagcgtccggaacgcaaagtacagttctttatcgaagtgtaccgccacctgcgcgaacgtatccgccaggatattatcaaaactgatgatccgattgacgctattgaacagatggaaatcgagctggcacggctgaccgacgaactgaccgcccgtgaacagaaactggcgatcagctcgaaaagtgtggccaatatcatccgcaaaactattcagcgcgaacagaaccgtatccgcatgcttaaccagggcctgcaggccgtggcattcggtcaggtcaaaggggtgcgcctgaatgtgaatatccgcgaaagccacgcgatactgctggatgtgctgtccgaagagcacgagcagcatcaggacctgttcgccagccagcgtctgaccttctctgaagcgatggcgaaactctatcagcgtctgaacccgcaggtggatatggggcagcgtctgccgcagaccatcggtgaggaactgctggattaccgtaactatctcgagctggaagtggaagtcaaccgtggttctgacggctggctgaaagccgagagcggcgcgttatccaccggtgaggcgattggtaccgggatgtccattctggtgatggtggtgcagagctgggaagaagaatcccgccgtctgcgcagcaaagatatttcgccgtgccgtctgctgttcctggatgaagcagcgcgtctggatgcgaaatctatagccaccctgtttgagctgtgcgatcgcttacagatgcagctgattattgcggcaccagaaaatatcagtccggagaaaggcacaacgtacaaactggtacgtaaagtcttcaataatcaggaacatgtgcatgtggtgggattgcgcggcttcggccagccggaaccaacgccggcaccggaagcattgcctgagccggtgacggaagaggaggatgacggggaagaagagcaggattaatttctccctccggtcttttctctgaagcggatgagcacattgctgtgctcatccgtgattgcagacaaagcaggataaaacgtggtttttcctgctttgtgttatcagccgaaaatcaataaattgattttcctggtttatttttacaacccctgtcggtcgttgccaacccttgcaggtttgtcaacggcctgagatgagcgcagcagtgcgctcatccgtttttttatatcagcgctgtgaatctaaaatctcgttgttatttacaacgtcctgcgctttggtatagctctcaatcagtaactgataggccgggaaaatctgtgtgtacgcctgtgcccattctgccgcatccgcacggttccaggttttttgcagttcagaggccaccgctgcagtatccatcggtaccacaccagcctggacaacgcgcgccagggtgatttcctgagccatcttggtataggtaccggaagcatcaattaccgcaaacacctgataaccgtcagccacggcgctgatcgccgggaatgccatacaaacgctggtaatggtaccggcgatgattaactgctttttaccggatgctttcactgcagccacaaactccgggttatcccaggcattaatttcacctttacgggcaatatactgagcatgtggtgcattttggtgaatttccgggatcagcggtccattcggaccctgcggcacagacgcggtggtgatcaccggaatattggcgagcgttgccatttttgccagcacagcggctctggcgcgtaattcagtcatcggcatatcgccgacagtctggaacaatccgctctgatgatcgattaacaacatcagtgcatcatcaggattaataacaggacgctgaccattaaagtttgccggattactcattttaagaccctcacttatggtaatttgatggtaatttttgtttaaacagtgtgtttctcagaaacgttctgttgtgcggattaaaattaatccataagcgaaaagctgagtagtgcggatattgataaacaatgttctgaattcagaacaatcatgcggctgtcagccggtataaagcggcggggattcctcaccgtgtgatctgaataacgttaatatgaaaccggaatggttagattctcactccgcgtgatcgacacagaaaattaaggatatacaatgcgtaaactgaccctcaccctgagtgccctggcactcgctctgagcctcaacagtgtggctgatgccaaagtgtacatgccggaaaaagtcagtgacggcgtgaccgttgctcagctggcagaacagcatgccattcactggatttcggttgaacagattgaagagagcctgaaagggcagccgccgatggcggtgggctttgatattgacgacactgtcttattctcaagcccgggcttttaccgcggcaaactggaatactccccgaacgactacagttatctgaaaaacccggaattctgggaaaaaatgaataatgagtgggataaattcagtatgccgaaaaaatccggtatggaactggttcagatgcacctgaaacgtggtgataccgtttatttcatcaccgggcgcagcaaaaccaaaacagaaacggtcaccaaatatgttcaggaagggctgcgtatcccggcagataaaatgaacccggttatttttgccggtgatgaggaagggcagaataataaagtcagctggatgcgtgatcacaaactgaaaatttattacggtgatgcggatgccgatattgccgcagcacgggaactgaatatccgcggtatccgggtattacgcgcttcgaactcctcgtatcagccgctgccgaaagccggtcagttcggcgaggaagtggttattaattccgaatattaatcataacctgtcagtcatctaagctccgcccccggcggagttttttatttgtgttgtttattgtccggcgcagatttgtttatccgggaagaaaagcagagaatgagatgtatttcatcgcactcaatacatgcgtttgcgtaattagtgcagtgtattcctcttaaaaagatgtatttgcgccttttttctacgattttttcgttatcctattttcaattattctctgacaggtaaaatcagcagggaagtcatttaaacgatacatttactatactgaccataagtattaacaattggccggaacagacataataaaaaataagagagggatgttatggtgacgggagttaaaaaagttgttcccatttccgccatgataggaacactgttactgacgcctgtttcgtgggcctcaacagcaccggtaacgcatctgactgaagcagatgccaaagtggaaaatctgaaagcattttcagaatcaccggaaagtacagaagcacaggccgcagagccggtggccggtgttaatgcactgcctctgagcgatgtcgctgacagtatccgccgtgaagttccggcggcaacaccgttactttataccgacacactgacaaacatttatgcggaacatcagctgaaaccgctgtggaccgatgaaaaagcgcgtctgtccctggaaaatcagctggcggaagccgcacttgccggattccagccgcagttcacggcctggctgaatgccctggcacaaccggatctgtccccgctggcgcgggatatgattttaacggatgcggcattgggttatctctattacctcgacaacgtgagcaccaaaggcgataaatggctgtacggcgcccgtccgttcacgtttgcggctgtcagtgccccgtcactggcgcggctgaatacagcggctcataacggcactctggcggcatttaccgatacgctgttaccggcgaataagatgtatcagccgatgcgcaaagccatgctgacagaactggcggataccgcgccgtggccggaaatggtgattaaccggacattgcgtccgggggaaagccatgaatctgtcggggcactgcgtgagatcctgcaccgctttaatctgatctctgccaatgacatgatgagcgccggtgctgtttatgataaaacgctggtggcggctgttaaacagtttcagttacagcacggcctggaagccgatggtgtcatcggtaaacagacccgtgagtggctgaataagacaccacagatgcgtgctgccattatggcggtgaatattcagcgtctgcgcattacgccggacaatgaaccgaccgctattctggtcaatattccggatttttccctgtatttctatgtggataataatctgatcctggaatccagaaccattgtcggccgtgcggagcgcaaaacgccgattatgtccagcgccctgaataatgtggtgattaacccgccgtggacggttccgccgaccatgagccgccaggatgttgtgccgcgcggcagggctgatccgagctatttcagcagccgtggttacactatctataacggctggagtaacaacgcctctgtggttgatccgtacagcattgactggagtattatcacgccgtcaaacttcccgtaccggataacccaggcaccgggcccgtccaactcgctgggacgctataaattcaatatgccgaactcagaggcgatttatctgcatgacaccccgaaccacagcctgtttaataaaaatatgcgggccatcagttccggctgtgtgcgggtgaataaagccaaagatctcgcggcgatactccttggtgatgcgggctggaacgaaacccgtgtggatggtgcgctgaaagcgggcagtacccgttacgtctctatcccgaaccgtattccggtttatctttattatcagactgcctgggtaaacgcggagaatatcccgcaatatcgcgcggatatttaccgttacgatgacaacagcctgaaaggtattgataaattaactgacattacgcctttcctgataaaaagctgatcacatgaagccgtttatttattacaaataagcggcttttttcttctgaaatataattaaccggaaaacgatgtgcagataaaaataattcactgcgcaatattatattctgtcattccgttaattaactaaaagtgattaattttgtgatatcaccgttcccggcaaaggctcagcggatgcggcatcgtgcccgtcacacaccgggtgttcatgaaaatgtcggtgaggtttactttctgagtaaaaatgtgtttttttatttgactccgggggattgaatcggtaaaaaatagacggtcagttttgtttattgctgtttttttcatattgacattaatattgaaataacctgacgaaaatttacagaaatagacaaaaccgatccgctgcgggtctgaacggtgaacacaattatcgctgtccggccatgtaatatttaatcagataaagagtgattaccgtcaatggatacaattgataacgaccgccgtaaatggctgggttttggtgcggcggcgctggggttggctttattaccgaatcacgcatttgcgtccctgaccacaccccggccgaaaattttacggtttgaaaatctcaataccggtgaatttttgaaagcagaattttttgacggtaaacgttataaccgctctgaactggcccgcctgaacaagttgttccgcgaccaccgcagtaataaagtcaaaaccattgacccgcacctgtttgaccagatgtatctgttgcaggtgatgatgaacatcaataaacctattcagctggtgtcaggttaccgttctctggtcactaataatgaactgcgcagaaccacctccggtgtggcgaagaaaagttatcacacccgcggacaggcaatggatttccgtattccgggtatccagttaagtcaggttcgtaaagcagccatgaaaatgcgggctggtggtgtgggttactatccgtccagtaatttcgttcatatggatacaggaccggtcagaacgtggtaatctgttgttattacccgctttaaccggagttttgtgtcatgcaatatcatattatccctgtcaccggctttatgcagaactgtaccctgatttggtgcgatgaaactaaagccgctgctattgtcgatcccggcggtgaagcgccgcgtcttatccgtgaaattgaacaacgcggtctgaaactggaaaaaatcctcctgactcacggtcactttgatcatgtcggcgcaactgcggatgtggcagagcactttaatgtgccgatcgtcggcccgcagaaggaagatgctttctggattgaggggctgacacagcagagccagatgttcggtgtggagccatgtcgtgcatttaccccggatcagtggctggaagagggcgacaaggtcactgtcggcaatcttgagctggatgtgctgcactgcccgggtcatacgccgggtcatgtggtgtttgtggataagcaggacaaactgatttcaatgggtgatgtgctgttcagagggggtgtcggccgcagtgacttcccgcgcggtaatcatcaggatctgatccgctccattaaagaaaaagtgctgccgctgggggatgagtaccgttttatcccgggccacggcccgatgtccacactcggggaagagcgccgcacaaatccgttcctgcaggatgagcaaccggtctggtaagcaatatcattgcagaaataaaaatgcctgacacagtcaggcattttttatggtcaaaacgaaattacagtactgcgacaatggcttcgcacagcggaaccatattttccagtgtcagaccggcaacgttgatacgaccggagctgacggcatagaccgcatattcatcacgcagacgtgcaacctgctctttggtcaggccgctgaaagagaacataccgttctggcggataataaagctgaagtcctgcttcgcgcctttttcctgtaaggtgttcacaaagagctgacgcatgcgcttgatgcgctcacgcatggtggtcagttcctggatccactcttctttcagttccggatcagacaatactgttgttaccacagcgccaccgtgtgacggcgggttagagtagttggtgcggataacgattttgatctggctgaacgcgcgatcagcggtatccggatcagccgcaaccagggtgcaggcaccgacacgttcattgtacatgccgaagtttttggaataagagctggccaccagcatttcaggatgagattttgcgaaaatacgcagcccctgagcatcctcatccagaccggcagcaaagccctgataagcaaagtcaaagaccggcagcagacctttttcttttaccagaacagacaattgtgcccactgctcagcagtcgggtcaataccggtcgggttgtggcagcagccgtgcagcaggatcacatcaccggcctgcgccgcttccaggcttgccagcatgccattgaaatccagtgaatggttttcggcatcatagtaattgtaagtgcagatttccagaccggcaccggcaaagataccgttgtggttaggccaggtcgggttgcttatccagacacgttttgcgctggtttgtttagcaatgaaatcagccgcgatacgcagcgcaccagtgccgcccggcgcctgtgcggtacgggcgcgtttggcggtgatgatgtcactgttatcaccaaacagcagtgcctgagttactgttccgaattcagggatcccggtaatcggcaggtagtttttcgtggtttcattatccagcagatacttttccgcttttttaacgcagctcagtaccggtgttttaccggtttcatctttataaacaccaatacctaaattgattttgttttcacgggggtcctgacggaagctgtcagccagacctaagatcgggtcggcaggcgcggcagtaatattctcaaacatagttgttgatcccaatagtatctgatagtgcggataagaggactgtcacaaggttatcaggttaactccctgtaaatcatttgccaactgtttacagaaaaaagacgaagatcttgtgaagtgggtgacgtcctgttgaggtttgcatgaaaatgcatcacaaaacgcgttaaacagataacaaaaaacccacggcaagccgtgggttttgtattcatacttagcgttaaagctaaatcagaactggtaggtcagacctaaaccaacaacatcaccagtgttgattttagcaccgcgggtgaagtcattgttgtccagcaggttgattttgtaatcaacaactgcagacatgtttttgttgaagtagtagtaagcacccaggtcgatgtatttaaccaggtcttcgctgcctttgctaccgttatccaggtctttacctttagactgcaggtaagcgatggatggacgcagaccgaagtcgaactggtactgtgctactaattcgaagttctgagttttgttagcgatgtcatcagcttcgccgtatttggtcatgttacgggtttcaccgtacagagcggccaggtacaggttgttagcgtcgtatttagcaccaacgttccatgcttcagcacgtttaccttcagcaccgaacatacctttctgctggttgatagtacgagcagagttagagtagccagcacccagagtcacgccccagcccaggtcgtaagaagatgataaaccataaccgtcaccattcgctttagcgctgtcacgtgctgcgatagagttatcgtcgttagcaccctgatactgcagagcgaagttcagaccatcaacgtaaccgaacatgtcggtgttacggtaggtcagcaggttagcattacgatcggtcatgaatacgtcggtctgtgccatggtgtcgccaccgaacagtggcagaacgtcggtccatgctgcagtgtcatataccacaccgtagttacggccgtagtcgattgaaccgaattcagcgaatttgaaaccagcgtaagctaaacgtactttgtttttgttgtcgccttcaacgccgttggttttgatttcgttttcgaaacgaccgaaaccggtcagttggtcagtgatctgagtttcacctttgatgccgaaacgaacgcgtgaatcgtcgccatcttctttagagccattgtcatcagacttagcgaacatgtgacgaacgtcaactttaccgtacaggtctactttgttgccgtctttgttgtagatttcagctgcgtttgctgcaccagcaactaacagagccgggataaccactgcaagaatattgcgtttcattattattaccctcattggtgttattcggacacctgccactgccagaaatagttctgaaaaaaatttggaactatttatgagagtttagtgtcgtctgtgtcggcgaccagtgttccattggtaaaatattttatctaccctgaaagtgctacaaaaacgaagaatctgtaacaaatggcaaaaaagtatttcaaaatgtaaataatcgggaactttttgaacagtcagatcatcagacataaaaaaagccgacctgaaggccggctttttacattcaatatttttgatgaaaatcagaatgtggcgctgcgcggggtgcgcgggaacgggatggtttcacggatatttgagacacccgtcacatatgataccaaacgctcgaagcccagaccgaaaccggcgtgcggcactgtgccgtagcggcgcagatcacggtaccaccagtaatcttctttattcatacccagttcatcgaagcgggcatcgagtctgtccagacgctcttcacgctgggaacccccgatgatttcaccgattcccggtgccagcacgtccatcgctgccacggttttgccgtcttcgttttcacgcatatagaaggctttgatcgctttcgggtagtttttaacgaccacaggcgctttgaaatgttcttccgccaggtaacgctcgtgctcagaggacatatccacgccccagtacacgtcgttttcaaaggttttgccgcagttttccaggattttgatcgcgtcggtgtaatcaacctgtgcgaaatcggaagtgacaaaacgttccagacgttcgattgcttctttattaatacgctcagcaaagaattcgaggtcgtcgcggcgctcttccagaacggctttgaagacatatttcagcatggcttcggccagaccggcgatatcattcaggttggcaaacgccacttccggctcaaccatccagaattccgccaggtggcggctggtgttggagttttccgcacggaatgtcgggccgaaggtgtagattttgctcagcgcagaggcataagcttcaccgttcagctgaccggatacagtcaggaaggcttcccggccgaaaaagtcttcgctgaaatccacttcgcctttgtcgttacgcggcaggttgtggaaatccagagtggagacgcggaacatttcaccggcaccttcggtatcggaggtggtgatcagcggggtggatacccagaagaaaccctgctcgtcgaagaaacggtgtaatgcctgggataaggtatgacggacacgggcaaccgcgccaatcaggttagtgcgcggacgcaggtgcgccacttcacgcagatactcgacagagtggcgttttgccgccatcgggtaggtatccggatcatcaaccataccgaccacacgaacctgtgaggcatggatttcaaagctttgtccctggcccggggaagcaaccactttcccggtaacttcaacagaacagcccgccgttaaatgaagcacttcatcattataattaggtaaattattttcgatgacggcctgtaccggattaaagcaggaaccgtcgtagacggcgaggaatgagatcccggcttttgaatctctccttgtacggacccaaccctgtaccgtgacttcgctgtcaacaggtacacggccttgcagtacatcgaccacaggcgctatgctcatagttgaaactctctcttcttatatataggtctgttacacgcgttacccgccatcctctgagatgtgagtaacagaatagtcatcagttgccgtcaaacgggcaatctcactatgttacttgctcactctcaggaaacaagcagaaattagggggtaacagcccgaaaaacagaaaaaataaccgtctttttctgttctccgggagcaggtatataaaaggagggatcagcaggcgcgctgaacgtggggaatatcaaatgcgcggcgcagtttatcgacaaattcatcatcttcacagatggttttgccggggctgtcagagagcttggcaaccggtttaccgttgcattccaccagcttgataacaatattgagcggctcgacatccgggatattgcaggtcaggcgggtgccgataccgaacaccagatttatccggtcacagaaatgggcataaagcgcgagggctttgcggaaatccaggttatctgaaaagaccagggttttgctcatcgggtcgatacccagcttttcataatgagcaatggctttttcaccccattccaccggatccccggaatcgtggcgcaggccctgataggcgcgggcaaacggggcatcgaaatcgcgcaggaaagcatccatcgtgatgcagtctgttaaggcgacaccaagctgatccggatattcatcaagccaggtctggagggcagcgcgctggctgttggccagttccgcactgatctgctgatgtgcctggaaccattcatgtgcctgggtgccgaccggctccagatcgagtttttccgccagcaggtaattgctggtgccgaccagatacgggaaatgctgtttcagttcagtgacaatggctttctgaacatcaaaagagaaacggcggcgggtaccgaaatccatcagtttaaagcggctgagatccagcccggcctgctctgcatcctgataaaaacgtgctaccagctcacgcagacggataacggcatcttccggcgtgacctgcggtgattcatgatggtggacgagttcactgatcagcgccagcagcggcacttcccacaggataacttccacccacgggccgctgatacggacagccagctggccgttgctgtcacagcggatattcacctgtgacggatcaaaacggaactgacggaaccaggcgaggtagtccgccgaaaagaacggcaggcgggccaggtagttgtactcgtcatcactgactgacagctctgccatcattgccacccggcggcgcagttcatctgcgtactgccccagccgtttgctgctccggcagcggaattccgcgaccacaggaattgagcggtaatgatggaacactgcctgctgcatatgcagcttatacgcatcggtatccagcagtgatgtgataatcggggttgcttctgaattcatggcgctttcagcatcctcacggagcaatcaacctaaacaggttatagcttactattatctgcgtatagtaacacgttattttccctgtgcgtgatgttcagcgcgcaatcacattatttgttaacattttattcatatttagtactgtaccgcaccgtcaggaaatcagggcgtatcacaaactgctaaaatttcgtttaccacggcgcctgaattatgagagcctaagtacagcgtaattgtaatcatttaataaaacagtgaagagaaaaccatgacacaacagcggcaggcgaagtatcgtcaggactatcaggctcctgactataccattacccatattgatctcgattttgcgctcgacccgcagacgacagtggtgactgccgtcagtcaggtgaagcgcctgaatgacaacgcctctgagctggtgcttgccggtgaggggctgaccctgaagcagctgaccattgacggcaaagtctggtcagattaccgcgaagaacccggttcgctgcgcattatgaatgtgcctgaacaattcaccctgcaaattattaatgaaatcagcccggcggaaaataccgcacttgaggggctgtatgtgtccggtgatgcactctgcacacagtgtgaggcggaaggtttccgtcatatcacgtattaccctgaccgtccggatgtgctggcgcgttacaccacccggatcacggcggacaaagcccgctatccgtatctgttatccaacggtaaccggattgatgccggggaatccggggataaacactgggtgaaatgggaagatccgttcccgaaaccaagttacctgtttgctctggtggccggtgattttgatgtgctgcgcgatacttttaccacccgcagcggccgtgatgtggcgctggagctgtttgtcgacaaaggtaacctcgatcgtgccggctgggcgatgacctccctgaaaaatgccatgaaatgggatgaggtgcgctttggtttcgagtatgacctcgacatctatatgattgtggctgttgatttctttaatatgggcgcgatggagaacaaagggctgaatgtctttaactccaaatatgtgctggcgaagaatgaaacagcgacggataaagattatctcgggattgaatctgttatcggtcatgaatatttccataactggaccggtaaccgtatcacctgccgtgactggttccagctcagcctgaaagaagggctgaccgttttccgtgaccaggaattcagctctgacctcggttcccgcccggtaaaccgtatcaataatgtccgcgtgatgcgtgccgctcagtttgccgaggacgccggtccgatggcgcacccgatccgtccggacaaagtcattgaaatgaataacttctatacgctgacggtgtatgagaagggctctgaagtgatccgcatgatccacacgctgctcggcgaagagcagttccaggcggggatgcagctttatgttcaccgccatgacggcagcgccgcgacctgtgatgattttgtgcaggcgatggaagatgcgtctaatgtcgatctgacactgttccgccgctggtacagccagtccggtacgccgctggtgactgtacgtgacagctatgatgcggataaaaaacagtatcagctgcatgtgacccagatgaccccgccgacaccggatcagcaggacaaacagccgctgcatatcccgtttgatattgaactgtacggcagtaacggcgacgtgcttgcgctgcgtcatgaaggggagccggttcattcagtactgaatattacccgtgatgaacagaccttcacctttgatgatgtcagtgaaaagccggtaccgtcactgttccgcgaattttccgcgccggtgaaagtggattatccgtacaccgatgcacagctggcatttctgatgcagcacgcccgtaatgaatttgcccgctgggatgccgcacagtctcttctggcattacatataaaggaaaacatccgccgttatcaggccggtgaagacttgcaattaccggaaggggtaaccgatgctttccgtgcagtgctgcttgatgagcagatcgatccggcactggcagctcagattctgaccctgccgtcagaaaccgaggttgcggaatggttcccggtggtggatccggatgcaattaatgcggtaatgacctatatcgccggcacatttgcccgtgaactggcggatgagctgtatgcggtgtatgtcagcatgaaaaccggggcatatcaaatcgatcatgcggatattgcaaaacgtgatctgcgcaatgtttgtctgggctatctggcactggatgaggacaaagcgcaggcggataagcgcgtgtcacaacagtatgcgcaggccgacaatatgaccgattctctggcggctctgacggcggcggtgaaggccgcgctgccgtgccgcgataaactgctggcggattacgacaacaaatggcatcaggatggtctggtgatggacaagtggtttattcttcaggccacacgtccggatgcggatgtgctggataatgtgaaatcactgctcactcaccggtccttcaccatggcgaacccgaaccgggtgcgctcactggtcggtgcgtttgtgatgaataacccgaaagcgttccatgataaatccggtaaaggctatgagttcctgacggagatcctctgtgatctgaacagccgtaacccgcaggtggcgtcacgtctgattgaaccgctgatccgcctgaaacggtatgacgacagccgtcagagcaaaatgcgtgatgcattgctgcgcctgaaagggctggaaaatctctccggtgatctgtttgaaaaaatcacaaaagcactggatgagaactgatcattgcttttgcggataaaggagcgatagcgggcagagaaacgaaaagcatgcgcgtcatggatgacgcgcctgagcgtacagggaggtatttacagcgacttttcgtttttgcccgctgtcagcgacttcactgaagctgattcagacaaacacctccccggaggtgtttttttttgcactgcaatacattgtcacagtaacagggcgttatttttaaccggatacggtaaactcaggccaatgacgacctgtatataaaagaaaggatttcgtgatgagaaatgaaataaaccggtacagtcgctggttacaggggatattttccctgtttttgctgctctttgctgtgacggcatttgctcagacggagacatttccccgtatgcagggatcggtcaccgataccgccggattgctgaccgccggtgagcgcagcagtattgagcagaaactgaatgcactgcgcgagcggaccggtacgcagattgcggtactgacggtgaacactaccgggtcgcgcgatattgaaagttatgcggaaaaagtctttagccagtggcgccttggtcgtatcaatattgatgacggaatcttattgctggtggcgtcagatgatcgcgcgatgcggattgaggtcggatacgggctggaaggagcggtgagtgatgcggtggcaaaccgtattctcaaggattatttcattccgaattttaaaatgggaaattatgccggtggtattaatgataccgtcgatgcgctgattgccagagtccgcaatgaaccactgccaccggttaccactccggcattctttattgccaaacaggcagggcccgtcggctgtattgatattgtgcttggtgcggtactggccgcgagtgcatatctgtggggcgctttcctgtatggcatggtgaaacgctttaaactgaaagcggcaattccgatcgccattattctttatctgacctggtacgccggcggctttaataatccggccggaaacggtattcatttcggggaagattttctctacacagaattaccgcgctggagtcagttcctgttcctgcagattctgccgttctggctggtgatagtgttgacattcaccatgtttatcgcggccttcttcttattcctgcttacgctcggcggattgtaccggatactgacgaaaattgtccggcctcagaagctgcgggtttcaatctgtgttggttttctgttcggcggatttgcttttattttcggattactgttttcagaggggagtctggccgccggtgtggtggcgggagtgggattcggcatgtttgtcgggatcgggcactatttcggttttgttactgtcggcggcggaggcggcagtggttcagggcgcggcggccgtggcgggggcagcagcggcggtggttacagcgggggcagccggagcagcagccgatcctcatccggaggcggaggacgcagcggtggcggcggggcatccggtcgctggtgatctgataataaatgacgcacattctttgtgcgtcatttactgcgtaaaaaagccgtgcagaacggacgcatttcacctattatagccgcctgagataggctcccgctgtttcagctatgattcacgacctattttgttacagagaaattgcccggtacggcgtgttgtgccgaaaacacatatctatagcaaaaggtatttaagatgtattatccgctagtcaggaaggccctgttccgccttgatccggaacgtgcccacgaattcacctttcaccagcttaaacgtctttcccgctctcctttccgttttcttattcagcagcatgtcgccaccaaacccgttcagtgcatgggactctcttttaaaaacccgctcggattagccgccggtcttgataaagacggtgaatgtattgaagcatttgatgcaatgggttttggttttgttgaggtcggtacggtcactccgaaaccacagccgggaaatgataagccgcgtctgtttcgtattgtcgaagcagaagggttaattaaccggatgggttttaataacctcggggtggataacctggttgagaatattaaacaggcccgtttcggcggtattctgggaattaatattggtaaaaataaagatacaccggttgaacagggaaaggatgactatctgatttgtatggacaaagtgtatacccacgccgggtatatcgctgttaacatctcctcaccgaatacccctggattacggacactgcaatacggcgatatgctggatgacttgctgtcagcaataaaaataaagcagcaggaactgcatcagaagcacggaaaatatgtacctgtcgcggtaaaaattgccccggatttaacagcggaagaattaattcaggtcgctgacagcctggtgcgccataatattgacggtgtgattgccaccaataccacattagaccgctcattagtgcagggattaaatcactgtaatgaaactggtggattaagtggccgcccggtgcagagtaagagcaccgaaattatccgtttattatcgaaagagctgaacgggaaattacctatcatcggtgtcggcggaatagattccctggttgccgcccgggaaaaaatggaagcgggtgcatctctgatccaaatctattcaggatttatctaccacgggcccaaattaattaaaaatattgtaaattgcctgtaattttcactattattcctgtcagggggtttatttttccccctgtttcttttatattttcagatgttgcctgaaaaattgtcactgacaggcaatgcacgttaaagcaaacaatcacttttaattattttatttaatgtgtagtgaaaatataaatcgctaatcaggtattagccgggaatgtgatcagatgaaaataaaacctgacgatcaatggcagtggtattacgatgatacgcatgagcgtattatgctggatcttgccaacggaatggtattccgctcccattttgcaccacgtctgctggcgccgtacgcacggtgtcacagtccgttttctgttgatgatgccgcgttattttttatctttgaagaacagattaaaaaattagatattccggcacagcagtgtgctgaattaacactgaatgcgttaattgcatcgcgttttttaaagccgcaaatgccgaagagctggtatttttcattgttctgcgcaatgacaaaaccggagcaggggcagctggttgaagtggtggcggataacaatcgtcagcgcagcaactttattgtggcggaagcaggggacagtgccagtttatgtctgctggttgatccggtacttgaattacacgatcggagcatgtgtttttgtgatccgataaagatcatgaatgatcgtttattaccaagaaccccggtaacacggagtttattaatgggcagagctgtctgaggctgtccggtaaacgatcataatcaggatcagataacgttatataacccccggcggatccttattattaataagtgatcaattcagccggaaatacccccggtagtttatctgccgggggtatttttttaccggttattcgtgacggccggttatccgtgacgaatagtaatattggttttcggaatacaactgcatgccagaatatcgccgttctcttttatcgccccggctttcagcggagtcacttcgccggagaccagcgtgactttgcagcaaccgcagacaccggcacggcaggaatacggaatattgacctgatggccttccagctgctccagtaagatgtgctgattattcaccgggtagagtttaccgttgaatatcagttccagtgctgcttccggttgtgcgggcgcggcctgtactttctcaacgatttgctcctcatactgacgcggtttgcaggtttccagtacggtgacggtatcaccgacctgaatcacaccgctgttgcgggcaatggcattcataccgaaatccacatcatcattatctgcggctttccggaaggtttgcagggtgtggaacggctccatttccgggtgtttaatccctttatcggtactgacagtggtgagaatacaacggctgcacggttttttcagatcaaataccacatcaccgacctgaatggttttccagcggtcttccgcaaacggctctgcaccagtgacaataatattgccgcggaactgctcgattttaataccggcaccgcagcgacgctgtacctcacgaaaagaggcttcattgaccaccagatagggataaccgtcggcaaacgacaccgcagtgtccgggaatttttttactctgcgggtggattgcgggctgagccagcgcagctgtaccgggatatcaaagaactgacacagccactgattgattttttccggtgcaagcagtgaggtgaaatggtttccccagacttcgcacggcaggtggtcaggacggaaatcctcaaacaggatcgtggcgccgctgccctccgggctgcgcaggtaaattccgttgctcagcagcaccggggtaaacaggaccatctgcgggtagcggcgggcggtgataaattttccggtctcatccgttatcataaaattgcggtcaaagcccagcccggtttccccggcatggctctgtgactggcggatgcccttcattgacttcacaggaaaggtgtataaacgggagagtgtgatgggtgttgtcgtcattgttatccgttcttttcgttattatcagtaataccacaatggcatcccggtttatccggaaaaaggtgaacgtcaattttatgatttaccgcccggatccgctataatgcgctccaattttttatttcaacggtaaaccatgatgaacgcgtattttgccagcaccgcccgcgggctcgaagaactcttaaaaaatgaattagcgacactgggcgctgaggatctcagtattacgcagggtggcgttcacttccgggcgcagccgcgtacgatgtacacgtgtctgatgtggagtcgtctggcatcccgtattttattaccgctgaatgagtttaatgtctatagcgacatggatctttatctcgcggtacagtccgttgactggccgtcggtgttctctgctgacaagacatttgccgtgcatttcaacgggactaacgatgagatccgtaacagccagtacggcgcactgaaagtcaaagatgctatcgtcgacagctttacccgcaaaaccggcacgcgcccggatgtggcaaaacagcagccggatatccgcatcaatgtctatctcaataaagaaaaagcctcgctggcaatcgacctgagcggggattccctgcatatccgcggctaccgcgaactggccggtcaggcaccgctgaaagagaacctggcggcggcgattattctgcgttccggctggcaaaaagagaccccgatggtggatccgatgtgcggctccggcaccctgctgattgaagcggcgatgattgcctctgattgtgcaccgggcctgaaccgccaccactgggggtttgaagcctggggcggccacgataaagcggtctgggaatctgtccgtgcagaagcccgcgaacgcgctaatgccggcctggtcagcgcaaccgcgcgcttcttcggctctgatactgataaacgtgtactggatatggcccgcgccaacgcccgccgcgccggggtggataaactgatcactttccagcagaaagatgccaccaaactggaaaatccgctgccggaaggcccgaaaggcaccattatttctaacccgccgtacggcgagcggctggaaagcgaaccggcactgattgccctgcacagtgtgttcggccgtgtggtgaaaacccgtttccccggctggcgtctgtcattattcagtgcttccccggaactcctcagcagcctgcagctgcgtgcagagcgtgaattcaaggcgaaaaacggtccgctggactgtgtgcagaaaaactatcagttaagtgacacaccaccggcaacagcgcaggatatcggggcggattttgccaaccgcctgcgcaagaatgagaaaaaattagcaaaatgggcgaagcaggaaggcgttgaatgttatcgcctttatgatgccgatctgcctgagtataatgtcgcggttgaccgctatgcggattatgtggtggttcaggaatatgcgccgccgaaaaccgtggatccgaacaaagcgcgtcagcgcctgtttgatgtgatcagcgcgacactggccgtgttggagttaccggcgcacaagctgatcctgaaaacccgtcagcgccagaaaggcaaacagcaatatgaaaaattggcggagaaacagaacagcttcctggtgaaagagtataacgcacagttatgggttaacctgactgattacctggataccggtctgttccttgatcaccgtattgcccgcaaaatgctgggacagatgagcaaaggcaaagacttcctcaatctgtttgcctacaccggctcggcaacggttcacgccggtctcggcggcgcgcgcagcaccacgtctgtggatatgtcacgcacgtatctggagtgggcggaacgcaacctgcagagcaacggcctgagcggcagacagcatcgtttaattcaggcggattgcctgagctggctggcacagaccccggaacagtttgatctgatctttatcgatccgccgacgttctccaactccaaacggatggaggacacctttgatgtccagcgtgatcacatcgacctgatgaaacatctgaaacgtatgctgcgccgcggcggcaccctgatgttctccaacaacaaacgcagttttaaattagatcaggacggtatggatgctctggggctggttgctcaggagatcaccgccaaaacacagtcacaggattttgcccgtaaccgtcagatccataactgctggcttatccgccacgcaggcgaggaataacagaaattatgtcgttgattaatatggcgggcgcctggctcgcattcagtgatgctccgctgctggaaaatgcggagatgcatatcgaagaaaatgagcgtgtctgtctggtcggacgcaacggagcggggaaatccaccctgatgcgtgtgctgaccaaagagcagccgctggatgacggtacggttatctatgaacaggatctgattgttgcccgtctgcagcaggatccgccgcgtgatgtggaaggcaccgtgtttgactttgtcgccgaaggggtggcagagcaggcgcagcatatcaaggcattccatcagatctcaaaattagtggaaagtgacccgagtgataaaaatctgtcaaaaatggcggaactgcaggaaattttagacactcagaatttatggctgctcgacagccggatcgcggatgtgatcgcgcacctggaattaccggcggatgaaaaattatccgcactgtccggcggctggttgcgtaaagcggcactcggccgtgcactggtcagcgggccgaaagtgctgtttctggatgaaccgaccaaccacctggatatcgaaaccatccagtggctggaaagcttcctgaaaaatttcagcgccagcattgtctttatttcccatgaccgttcatttatccgcaatatggcgacacggattatcgatctggatcgcggtaaattagcctcctggccgggcagttatgatgattatctggtggccaaggaagaggcactgcgtgtcgaagagatgcagaatgcggaatttgaccgcaagctggcgcaggaagaagtctggatccgtcagggcatcaaagcccgccgtacccgtaatgaagggcgcgtccgtgccctgaaagccctgcgcagcgaacgagcggaacgccgtgaggtgatgggcaaagcgaagatgcaggtggaagaggcgacccgctccggcaaaatcgtctttgaaatcgatgatatcagctatggtattgacggtaaggatctggtcagtcatttcagtgctcaggtaaaccggggggacaaaattgccctggtcggcccgaacggctgcggtaaaaccacattgctgaaactgatgctcggtgatttacagccggacgacggtagtgtacacatcggtaccaaactggaagtggcttacttcgaccagcaccgtgcagcgctggatccggataaaaccgtgatggataacctggcggaaggcaaacaggaagtgctggttaacggcaaaccgcgccatgtgctcggctatttacaggaattcctgttccatccgaaacgggcgagaacgccggtgcgggccctgtccggcggggaacgtaaccgcctgctgctggcaagattgttcctgaaaccgagcaatctgctgatcctcgatgaaccgaccaacgaccttgatgtcgaaacactggaactgctggaagagctggtggataactatcagggtaccgtcctgctggtcagccatgatcgtcagtttgttgataactgcgtgaccgaatgctggatttttgaaggtaacggcaccatcgggcgttatgtcggcggttactttgatgcacaacagcagcgggcacaggttcagtcgctgaaagcgccggcggagaaagcagcgaaaccggaagcggcggaagaaaaacgtaaagataacattaaaaaagcaaatacatctgcaaaattaagttataaattacagcgggaacttgaacaactgccgtcattgctggaatctctcgacgaggaaattcagcaactgcaaagtcaggtcagtgcgcctgaattctttaaccagccgcatgatgaaacagataaagtactgaagctgctggcagagaaagagcatgcgctggaagaggcgtttgagcgctggcagacactggaagcaatgcagagcgggaactgatcccgcctgtgattttggagaaataacgaaacagtgtgtgctcatcattcacatgattcagtcacggtgctgtgtccgcagtgcgacctggtggtggaaatccctgagctggaacggggaaccaaagccgaatgtccgcgctgccacactcacctggccgcccgctggcgtgaaccgcgccgccagccgctgatgtatgcactcagcggcctggtgatgtttgtactcgccgggatgtttccgtttgtctcgatgaaagtggcaggtattgaaagcgaaatcacgctttatcagataccgtctgtgatgttcggggataactacggcgggctggcactgttctttatgggatttgtgctggcggtaccggccttctgcctgtttgccattaccttactgtgcagcgggatccgtctgccgccttcgctggccattccggtcacgcggctgctgttccggctgcgtgcctggtgtatggcggagattttcctcgccggtgtgctggtcagtttcgtgaaactgatggcgtacggggatatcgggctgggcgtgagttttctgccatattgtctgttctgtgtgatgcaggtgcgggcattccagtgcctggataaacactgggtctggcagcggattgcaccgcgtccgccgctgccggtggcgctggaggcaggaaaaggcggtttgtgtcagggggtgcggctgtgcggtacctgtcaggcgattctgccggcagatatgcatgagtgtccgcgctgcagcagccggggtcatgcccggcggccgaacagcttacaactgaccatggcactgctgtttacctccgtgattttatatatcccggcaaacctgatgccgattatgatcaccgaatccctcggcagtgatttcggctcgaccattatggccggggtgattttgctgtggggggatggctcttatccggtggcgatggtgatttttatcgccagtatcatggtgccgagcctgaaaatgctggccatcggctggctgtgtctggatgccaaaggtcacggctggcgtgatcccggccggatgcactttatttatgaaatcgtggagtttgtcggacgctggtccatgattgatgtgtttgtgatagccgtactagcggcactggtgcggatggggcgtctgatgagcatctatccggatatcggtgtgattttatttgcgatggtggtcattctgacaatgattgccgccgaaatgttcgacccgcgcctgacgtgggatcggcttgaaaaaaaacgggcggagagtgctaaggagcctcaggttgaacgataaaactgatgatttgacagaagcgaaggtcagcaaactgaaaagctggtcaccggtctggataattcccatcgtcacggtactgattggtgcctggatccttatcagccactttcgcggacagggaccggaaatcaccctgatcacttataacgcggaaggggtcgaagccggtaaaaccaaaatcaaaagccgcagcgtggatgtcggtgtggttgaaagtgtcatgctggatcagagttacagccgcgtgatcatcaaggcccgcctgaacgcagagatgaaagacgttctgcgtaaagataccgttttctgggtggtgaaaccgacggtcggccgtgaaggggtctccgggctgggcacactgctgtcaggggcatatattcaggtgcagcctgccaataccggcggcgaacgccgtgaatttgaactgcttgattcaccgccgctggcgtctccggacgccaaagggatccgcgtgatattaaccagtcagcaggccggacaactgaatccgggggatgctgtgctgttccgtggttaccgtgtcggttccgtggaaacggcagaatttaatcttgatgagcgcgagatgcagtatgagctctttatcaacgcaccttatgacaaactggtgaccaccaacgcccgcttctggaaggacagcggtattgcctttgacatgtcctcgcagggggtaagtgtacaggtcggttcgctctccacactgttcagcggcggcgtcagttttgatgtgccggacggctggcagccgggtgaggaagtgaatcctaagaccctgtttaagctgtttgataaccagaaaagcacgcaaaattcactctacaccgaatataaaagttatctgctgttcttctccgactctgtgcgcggcctgtctccgggcgcaccggtggaattccgcggtatccgtctcggtacagtggcacaggttccgttctacgccaaagggttggggcagacatttgatcaggatttccgcatcccggtcctgatccatatcgagcccgagcgtttcgagaaagatgtaggtaaagatttcaaactggcacaggaactggaaaccgcattacagcaggggctgcgcgcctcactgaaatccggtaacttactgaccggcgcactgtatgttgatctcgatttctacccggatcagccggcgtggaaagcaccgatgaaaattgcggattatgacattctgccgaccaccagcggtggcctggttcagctgcagcaaaaagtactggcggcgctggataaaatcaacggcatgccgattgaaccgatgatgaaacaggcgacagagacactgcgtgccagcgaaaaaaccatcgctgaagcacagaaaacactgtctgagctgaatgtgttactcagcagcaaagagttcaaagcgctgccgaaagatatgcaggccacgctgcgtgaactgaaccgcagtatgcagggtatccagccggggtcaccggcgtacaacaaactggttgatgatatgcagcgtctggatcaggttctgcgtgaattacagccggtactgcgtaccctgaataacaagagcaatgctctggtctttgaagccgcgccgcaggcggatccgcaacctaagaaggcgaagaattaagatgaagaaactgacaaaagcactggcattcctgggcgtttttgtactggcggggtgcagcagcaccccggtgaaacagtattatcagttaccagtggtggcggctgcggacagcagcagtgaacagacaagcttccgcagtaccggcagtgacaaccgccatccgcagttatggatccagcgtatcacgctcggggatgtgctgggaaatgccgggattgtctatcagaccagtgatgtggaatacaacatcggcagcactaacttatgggccggtccgctggagcagcagttgctggaagtaatgacgacggaactcagtcaggcactgccggacagactggtttcggtgcagccgctggaaagtaaaccggataccctgactgtcactgtcaccggtttccacggccgttatgacggcaaagtgattgtggcgggcagctggatttacacccacggtgacgcggttatccgccacccgtttaatctggtactggaacaggcggaaaacggctatccggcgctggtacgtacgctgggggaaggctgggcgcaggtatcaaaatcggtggctgacgagctgcgtaaataattgctggtttactctctgcaccggatgtgcagagagtaaattgtcatcaaaatgacaaatttgtgaaacacgccacattaatccgcttaatctgctgatcgctaaaacgattcttatttcgtctgaaacatccttctgaatacctttacggtcccctgaaaactaataatctgattacgctggtaaaataacagccctgtttttattgtgtatttttatgaaaagcggaactgacacaccctgaaccttctttacttgcaaactccggcccgaaagcgtatttctattatgggttgaataaaaatcaacctgttttcagcactgaataacatgagggaagtaacggcatgaaaagacaaaagcgtgatcgtttagccagagcattaaccaaaggttatcaggcgggtattttaggacgttctaaagagagttgcccgtatcttaaaattgacgaacgttctcattggttgggaggctggcgcgaggccatcgataaaagggcggtcattgcgtaacccggtttgaaggataaaaaacctccgctgtgcggaggttttttacggataacaccaataacaccacggcaggaaagattaaaacgcgctggtgtctttgaaaagacccactttcagatctgttgcagtgtaaatcagtttatcatcaacaaagacttcgccgtcaccgatgcccatgatcagcttgcggttgatcacacgcttgaggtggatgcggtaggtgacctttttcgaggtcggcagtacctggccggtaaatttcacttcacccacacccagtgcacggcctttcccttcgccgcccagccagccgagataaaaaccgactaactgccacatggcatccaggcccagacagcccggcatgaccggatcattgacgaaatggcaaccgaaaaaccacagctcaggtttgatatccagctcagcttcgatatagcctttatcaaaatgcccgccggtttcgctcattttaatgacgcgatccatcatcagcatgttgccggatggcagcggcggcccgtcttcaccaaagagttcgccccgtcctgaggcttcaagttcttgctttgtgtaggattcttgttttgcgaccataactcaatctttgccttgtttatcagataggctacacaatagcttacacttgtacgctgaacaagtccgatcagataaaaattgtgctatttccaccagcgggaaaaccacgaatttcttggtttatcctgattgttcgccaggaaaatccgatcctgaattatagctaacaggtgttctccggacggattaccgtcctcttcatagtacggcatattcatcaggtgtgaggccgcctgagagacgtggcctgctgtccatatgtggaattcaccctgacgtaccgcttcaaccacatcatctgacaggaccaggtgacgctcgttggaggccgggataatcacaccttgtttgccggtcagccctctggcctgacacagccggaagaaaccttcgattttttcatttacgccgccgatggcctgcacaaacccgaactggtcaacagaaccggtcacggcaatctgctggtcaaccggctgccaggagagggcactgataagtgcgcacagctcagccagagaggcgctgtcaccatccacttcgccgtaggactgttcaaagaccacggaggtggagaacgggaacggctgttccagtttaagctccgcaatcaggtaagcctgcataatcatcatacccttggcgtgaatattaccgccaagctctgatttgcgctccacatcaacaaattcaccatcaccgatatgtgccacacaggtgatacgggagggctctccggtcgcttccgggtgtcccggatactgcagaacggacagtccgttgatctggccgacagcactgccctgagtctggatatacacctgaccctgaagaatctcatccagcccgcgatcggccagatagccgtggcgccagctgcggttgtctttgattttgcgcagcgcttctgcggtgatggtgtccgcaggcagcagggtggcggcatcgcgcagcagagtggtcagccatgtcaggtcgagcggcagggtccttttatcttcctgaaaacgcatcccctgacggagcagctcataccagccgtcagcactgagcggcggcagctgattttgcttcagcagcccgttgacaaactgacaccagacggtcagctgttctgtttcttccagctgacaatcaaattcatattcgccgtacagcgcttcttcgctcagttccggctcggagagcataaactcatccagactcagacgatcgcccaccacgatgacccgcaggttaagcggcatgctgtcaaccgggaacggcagcggatgctgttcggtgtgagccagccagtcaaaacgctgtgcgcagaccatctgctttaaacgcagccacatcagcggctgtgcgagcaggctgcgcagtgacatgatcagaaagccgccattaacctgatgaataataccgggctgcaactgcacatgctggtgatgggtatagacctggccgaacagctgctccggttcaatccagtcacagacagcaaacggctgcactgcactgaaatggccgttatccgacggtgtaaagacaaacctgtgattatcgaagtggtattcaccgcccatagtgcgtttttgccggattttgacttccggtggcagtaattgcgctatggtattcaggtagcactcgctttcgtcacttttgaccagcataaaacggcgttttgccgccggatggctgaaaagtgacaggctttcctgtaaacgcggctgcacgatatcagcctgctgagcaggcagttcagaagcggtttgcaggatggtgtggtaactgttttcatcaggcagtaatgcctgccaggtcagctgtttaatattcactcggtattgtctgcttttgataatgtcggatttaatcgttgcggcaggatctggtgctccccgcagtgtgcggttatcagcaccgcctttgaatagtaacgaaaatagcgggacattgtagcgcgtaagcaggccggatagctatcctcgcggcgtttatttttacccgtcctgagcggaaagaattgtgcagaggagcggttttttacggggaatattgctatgcttatgtcagtgttaccctgtcactgagaaaaatcatgaaatatcagcaactagagaatcttgaatgtggctggaagtgggcatatctggtcaaaaaacaccgcgaaggtgaagaaattacccgttatacggaaaaaagccgggctgaggaagcagtggcgcagttactgaaactggagtcacatccggtaaaagtgacggcgtggatacaaaaacatatggcaccgggactggcgaaccggatgagtcagactatccgcgcacggcgcaagcggcattttaatgctgagcagcagcatacccgcaaaaaatcggttgatctggagtttctggtctggcagcggctgtcggcgttatcacagcggcgcggcagtaccttatcggacacgattgtgcagttgctggaagatgcggagcgcaaggaaaagtacgcgacgaagatgacatcgctgaaggaagatctgcaaagcctgctgggaacagacaaaaaataaaccccatccggagatggggtttatacaattcattgcatcatacaaccgaattcagaacttactgagcagcctgctgagagacttgttcagttacaccctggatttcgatttcaacacgacggtctggtgccagacattcgatcagagcagcgcgctgtttgatattgtcacatttgttgccagtaacaggatcttctttaccgcggccttctgcacggatgctgccggctgggatgcctttagcgaccaggtaatctacaacgctctgtgcacgtttctgagacagtggcaggttgtagttctgggaaccgatgcggtcagtgtaaccgataaccaggacgttgccctgagtcgggtcgattgacgccagttcgttgaacagctggttcagagcttcctgaccttcagctttcagagtagatttgttgaagttgaacagaacgtctgaacgcagggtgaaacgtttgttctcaacaactggtgcaacaaccggagctggttctgcaactggtgcagcaacttcatcctggccgaaacggtaagcaacaccaacactcagcatgccgttatcaggacgtgccatggtggtttctttatcgccgatgttgttgatccactgatattctacgcgagctgcgatatcacgggtgattgcatactcagtacccagtgcgaacagcggagaaacgccagtgtcgttatctttgatacgctcaccgttgtaagatgcggttgcgtctgcacgccataccattgcacccagacgggtataaacgtctaagtcatccattaccggatagctcagtttggtagtcagctgaacgccctgtgctttgaatgcgccgttgttaccgtcgcctttgtaaggcatacgacctaaccagtcataacctaattcaaagcccatgtactggttgtgctgataaccagcatagataccagcgccgagctgatctttatgaaccggaccagtgttgcctaagctttcaccgtcaaaaccagtaccggtgttctgatactgagaccaacctaatttaccaccggtataccaggtattgtcttttggagctgcctgcgcaacgcttgcgaaagctgccactgccactgctactgcgatagctgtctttttcattttacgcctcgttatcatccaaattggctctggcttaatagccttattatcgcctttggtttttaaaaatagtcagggattatgtgcgctatttagtaaatagctcccaacagggaattttaagcactaccttaacggtgtaaagtctacagcgaactataaaagttacaagcctgtcctgtggaattcgactaaaaaaatgtaaaaaactgtactgattcataaacatacaaaatagtcaatttctttggatatttggcttaacacgttgaaatagtgtaattttattaaccaagcagagcaaatgatacgggcatgtaaaaaactctgagaatattcttaattttccttaatgataagggaaagagtgaatttgtaatgtattcagttgtcgtgcaacaggtgcactgtcatgatgccattcctgcggacgcataataaaaccgaggcagccgccctgttccgcagcgcgctgtaaccgggcattttcctgctcagtcagtaccggcagccagcccagaaccacactgtagttaccgctggcgagtgctttctccatagcgacaacactgttgattgccgggatgcgggacaactgcatgattttatcacccggcagctgattctgcgataaccaggtgcggttaagttttgcacccggagagagccataacagccagcgggactccccggcaagctgacgtaataaaggaagcagaatgtgggtcaggacgatatcattattgcgataaaccagttcgctgaccattccgttcagacggcgttcccccgcaagggcgggtgacacagatgccggtgtaacagggacgtattcccgggttgcctgctggcgcatagttaacctcacatagtgatactgtatatgtgtacagtataatccaattccgctcagatcaagtaaattttttccatacaactcgcaaaattcaggtttgccggatacaaatacgaatttatcgttggcaatcggggaaacattccttattttgtggcgacagctgagctcagtcagggaatgacacaacgatacgtttaacctgctttcaaaggactgataatatgaaggattatttgaaattgtcagatgttcagtttgatcgtcttcaacacagcacacagccgttcggccggatccgcctgaaatcacagttcgggtgtatgggattatccattgaccgggtcactttcgcactgatagccaacagtcagctctggctgaaaagcacagaggccacccgcgagctgttctgccggctggaactgagtgaccggtttacttatcccaagcggatcctgccgatgcggattaactattaccgtgttccggacgcggtatggcagtgccctcagcagagtgagttccttttttaccagacctacctgcatgcacgggaacatgcacagtcacagcagcaactgccgtcgcggattaaagatctgccgaatgtggacagagctctggaacgccgcttatggcaggcggggatccgccgggtggatgacctctatttgctgggtgccaaagcgagctttctgaaggtcaaagcccggccgcagaatgagctgaaattactgtttgccatcgcgggagccattgaggggtgccacagtgcggtattaccgaaagcactgcgggaggatcttatccattggcatggccggctgaactaaacggcgcaggtatcccggggaaatgttttccccgggaagacatcagctgtccggtgtttcttccgccgcagtctgttttttgcggcggaaccgcccggcggaaggctgcagattatgctctttatcattgatctgccggataagcccggtaatgtccggtgtcaggctgagtaacaggcgaatctgctccagcaccagctgctcggtgctgttattgtcacaggtacatttatccagacgctgtgcgagcgcatctgaaatagcctgaatctgcaaatcttcccgatgtcctttttgcagtgcggtctcgatatagcggatggcatcattcagcagacgcagaatagtgtcatccgtgagcttggtgcggtgagccccgagcgcggaaatataactgagcagggtgtggttgagacagagcaggcggaacgcctcatcctgagatgtacggtaactgctcggctctgaggatatgttcgctaccacagaggcaaactccccgtcgctgatatgcgcatcacggcgggcaacccggtactccaggctgtcagttttaccgttgtaatactgttgcaggatttgttccagataacggccgtttgcctgcatggtgcggtcaatcaccagcggcagctggcggtatttccagtccggccagatatagctgacagcaaaccaggcgagtccgcagccgatcagggtatcgatgatgcggtggatggcgatatcaaacccttcacccagcaggttaaaactgaacagcaccagcagggtaataaaaatagtggcctgggcgtactgactggtgcggaacacaaagaacatcagcccggacagtaccatcagaataagctgtccctcataagacggcacaaaatacatgatcggcaggccgataaggatcccggcgagagtccccactatgcgcagcatcaggcggcgtcgtgtggcactgtagttcggctggcagacaaacaggctggtcagcataatccagtaaccgcgggtcagatcgaaggtcaggataatggcgtaaccggcacacagcagcagcgacatccggatagcatggcggaacagggcggagcgtggtgtcaggttctgcctgacccgcgcccagatatcacgcagtccctgcaggttttcgttggacaggcgtgcatcttcctgcatcttttccgccggaagctgagtctgctctgcggtcagtcctttaagctgggaatcgacaccgcgcaggttggtcagcagatggcgcagagccatgacactgctgttaccgggcttttgctgctccagcaggttgagggagttttccagataagaaaatgtccgctcaaaacgcgggttatggtgatatttgcggcgctgcaaaatggcctgcgcaacagcggcgcaggcatgtccctgcatggtcatcagccgctgaaagcggaacataatatcgctgtaacgcagttcattgcttaaattctgatactggatatgagacgaactcgcccgctcgtgaatatcctgggcaacaaagtaataatgaagggcatggcgggtactgcgctggccgcggtcacctttcaggcgggaaaacagggtcatttttgcctgatgcatggcttccgtcagtgcgctgttcgccatcgccagttcaaagacggactgctgataatcttcttctatatccgggtcaaacaggtttgcttttgcctccagataattggagagctgcatataatagcgggcaagattatcctgcagcggacggacagggaaaaacaggtgcccggtcagggtcagcaggttataccagaccgcaccggtcagcagtaacagcggttgctgataccagtcatcaaacaggtttttacccagcatggtgtaaatcgcgatcagcagtgccccgaaagcaatggtggcgtaacgctgtccgagcgcacccaacagaataaacccgctggttgataccgcaagtcctgccataaacaggaggtggtggtcatacagcagttcaatagccgcagacgcgacaaagaaagagatcagcgtgataaacagattacgcagacgcccggcgagccggtcatccaggtctgtcagtgcggcggctaccatcccgagtgtcagggcaatggtgactttcggcgacatgtgcagcagccacggcaccagcgtggtacctgtcagcgcaatcaggatgcggaaataataaagaaaatggctgttataaatataccggctgaagccgagaaacgctgcaagcacaataacctcaatgagtcagaaatacccttaacgggaatttggcagtaaactaattgtgtctttcctgtaatatggcaatggtatggcgctggcatacgttttaccacatctggttttatcacatattgatttcaatcttgtaacggtgcggaacacatggaattaaaatcaacacaaatggggcagacactggcccggcatccttacaaccgcgtgcggttactcaacgcaggtatcgaagtcagcggggcaaaacaccggtatgttattcctttcaatgagttaatcaatattcaatgtaaacgcggtatcgtctggggcgaactggaatttgaactgccggatgagcaggttgtgcgtctgcacggtacccagtggcaggaaactcaggaattctatcagtatcttaccgatatctggtcacgctggagtgaagagatgagcgtggtcagcgcgggtgtgctggataaacaggtcagtgaaattaagtcggtgattcaggccgaccgctggctgacacaaccggaaagtcagaaactccgtgacaacattctgcacgcctttgcggcactgccgctgccccgtgcgcgtctggccggttttgataattgtgcacagtcttatcagttttgtctggactggctcagccacaccgatgaaaaacgccgtcagcgcaaccgcgaatggacacaacaatgccttgaaacctacgtggatttctttgccggtgtggaatcctccccgctgaatacttcgcagagtgaggcggtggttaatggtgagccttccgtgctggtactggcgggagccggaagcggtaaaacatcggtgctggtggcacgggcaggctggctgctgcgccgtcagcaggcgctgccggagcagatcctgatgctcgccttcgggcggcaggcggcggatgagatgaatgaacggatccgcacctgtctgcacacagaagagatccgcagtaaaacctttcacgccctcgcactgcatattatccgcgaagcatccaataaatcgccggttatcagtgcgctggaaagcgacacagccgcccgtcatgaactgattaaatccgtctggcagactcagtgccgtgagaaaaaagcacaggcaaaaggctggcgcgaacttatcagcggcagtatgaactggctggtggatgaggaggaatactgggaagatgaaaccctgtgccgccgcatggtgccgaggattgaccgctggctgagcctgatgcgcatgaacggcggtagtcagaaagtgatgattgagtccgcaccgccggatattgcaccggaattcacaaaacaaatcaaactgatggcgccgtttttaaaagcctggaaaagtgccctgaaagacgagggggcgacagacttctccgggcttatccatcaggcggtgaacctgattgaaaaagggcgctttatctcgccgtggaaagcggtgctggtggatgagttccaggatatctcaccgctgcgggcaaaactgatccatgccctgcgggcccagaacccgcagaccacactatttgctgtcggtgatgactggcaggctatttaccgtttcagtggtgcggaactgacactgaccacggatttcagcgcggtcttcggcgaagggggacagtgtgcgctggataccacataccgctttaacagccgtatcggggagatcgccaacgaatttattcagcgtaacccgcagcagttaaccaaacccctgaacagcctgacgaaaggggataaaaaagcggtgctgttactgccggacagtcagctggaagcattactgaataaaatgagcggttatgtgaccggagaagaaacggttctgatcctggcgcgttatcaccaccttaaaccggagattctgtcggtggcagcaacccgctggccgcatctcaatatccgttttatgaccatgcatgcctcgaaaggtcagcagtcggattacgtcattattaccggactgacggatgaacgggacggtttcccggctgcagcacgggaatcggtgattgagcagggattactgccgcgggaagaggagtttatacatgccgaggagcgtcgcctgatgtatgtggcgctgacccgggcaaaaaaacaggtctggttgctgtatgacaaagactcgccgtcctgcttcgcggaagaactggcggatatgggcgtcagccgggtgaaaaagccctgaaatatgaaagaagcggcggtaaattatcaccgccgcagaaagccgttactgagtccgctcacttaaatagcggttgtaatccggaataacaatatccacatcgttatcgaaatccggcgagtgaataataaaatcagctgtggacatattggttgccaccgggatattccagacggtcgccaggcgcagcagcgctttcacatccgggtcatgaggcacggcattgagcggatcccagaaaaaaatcagcacatcaattttcccttccgcaatcattgagcctatctgctgatccccgcccatcggcccgctcagcatgccggtgatttcaagcccggtttcgcggctgatcagtttgccggtagtgccggtggcgaacagctcatggccttctaatttagccagattgcgtttaacccagtccagtaatttggttttatagtgatcatgagccacaagggcgatttttttatgcttggtcagtactcgggtggtcgattccataacgctctcttttccggcgaataaaatgttattcaataacataagcgaaaaaaagggttccgccaacaggtgattttcaattcagtatgctataactcagattgttgcgcaggatgataaaagaggcttctatgaatgacacatttctgaccggtattcttcagcaggtaaaaacgatcgctgtggcgggggcgagtgataaaccggaccgccctgtttatcatgtgatggagtatctgctgggacagggataccgggtgattccggtgaatccgaaactggcgggaaaaaccctgatcgggcagatggtgtatgccacgcttgccgatattccggagccggtggatatggtggatgttttccgtaatgcggatgccgcaccgggtattgcgcaggaagcgattgccataaaagcgaaagtgctgtggctgcagcaggggattatcagcagtgaggcgaaagcgctggcggaaaacgccgggctgctgtttgttgaggatcgctgcccgaaaattgagatcccacgtctggggctggaaaagtaagtaaaaataaagccccggcatgtgagtggcggggctcttcgtattgttaattgcgcaaccggggagactgtaactggttgcggatggactcagccagttcatccatagtgatgttatcggggtggtcttcatccatctcataggtgatctgggcttctgccagatagctatggataggctcaccgttatcgtcttccatcacgacgtggtaccagggcgcagagcgcaggttcatattggatgcgatgtcgtcctcttccggctgatccagtgagtattcagcatcaatgtcgacaatcacgcccaggtagccaagcagcttatggcgaacttgttgtccgataccgaacttacttgaaatcatcataatcacctccgaagaaactttgctctgttactaatatggggggtactgatgacagattcaatcccttaacagattgttgtttcctatcactgcaatcagcaacagctgacaatttcaggttatcggggagtgggtaaaattacaaccggcggacagcgatacagattaaaatagtgacattttcggaaaaaggagcgatataatgaagatcggacgacattttgccgtatacggacgcgttcagggcgttggtttccgctatcaaacgttttactgggcaaaacgccataatgtgaccggttttgtccgcaatcgtcaggatggcagtgtggaaattgaagcgtatggcgatgaaagtgtgctggaggccatgaccgcatggctggaggcgggcgggccgccgggggcgaaagtgacagatatcatcgcaaccccctgtgattacagggaagttgcggtattccgtgtccgccacgaataaacggcggtcagatacatttcaccggtttcggcagaccggccagctttgttgcctgtttggccgggcctttcggaaacaggcggtacagataacgactgttcccgcgctcctcgccatacttctgtgtgatggctttcaccagcatgcggatagccggtgaggtattaaattccagataaaaatcccgcacaaagcggataacttcccagtgctgttctgtcagggtgatttcttcctgttcagccagcagcggcaccattgcttcctgccagtcctgcacattgagtaaatagccgtgggggtcagtggcgatttcacgcccttcaaacacaaacataatctgaacctgctgaaaatgagaatgaaaatgtagcaaaaatctgccgctaccccaagcatcagaagaaagaaagcggtgataatgatgataaaatcagctaacacattgagaaatgactaaatttccggcatttaaactatccgggactttacaaggcacagtgaggggactatagtgcacgtcattgcggaggggtggccgagcggcttaaggcagcggtcttgaaaaccgccgacgggaaaccgtccgagagttcgaatctctcctcctccgccatctcaacgtctcccagtatctcctgaagtctctcaattcctgataaatcattccttacagtaacgttatttgcccggctatcagcgaaaacctcaccaaactgcacagtatgaatttcgctgaagtcagatataacagagtgcagggcgtgatattatgatggtgccacttcgctttgtctgattcgttccgtattgggtcaccggagttttatgtttaacttttaacaatgttagaggtttaaaatatatttcagttcttttattttttctttttgcggcgactgatgaatatctgcacagtagcttttttcatattcatcgattaaattttccacagagagtcttttgttcggaacatccatttttaaatcatctcttgcttcctgctgtaaacgcatactatcgtaaccgctcattttaggtatttcatcaccaaaaacagatgttaccccattcatgcgaaaattaaccttcgcttgttgatctccgatttcatcaacggcaagcctgcacttcatatattttacgactttcgtttcctgagtatcgcagccttgtaataaaatacatccgattgtaacgacaataataccgaaaattttcatccctcagatacccttaatttaatggtaataaagtgtgattttctcacaaaaaattatccgtgataaataaaaggtttctctgttccctgaaccgaaacagttttctcagataattttcttcaggcggactgtccactccggccggaagctgatgtcgccgcattcagcatcatgctgctgattagcacaatattttttccggcaatatttcccttcccgtttcgtcaaaaatgtcgattattgttgtctgacacatcaaaaaaccgatccttcattgattataaagctattttttactggcatgtaatatgcatagatgacatttcttttcttactcttttactccctggtcaggggaaaggacgtcaaatgaataaagtcatatctgtatgcccgtattgtggtgccggttgtaaactgaatctttgtgttgaaaacggaaaaataatcaaagcagaaggtgctgatggtgttaccaaccaggggcagctgtgtctgaaagggttatatggctgggattttcttaatgataacaagttactgacagccagaataaatcagccgatgatccgcagagaaaaaggcgcaccgtttgaagttgtcagctggcgggaggcgattaattataccgctcaccggctgaaacagattaaagaaaagtacggtgcaaaatccattatgtgtacgggctcctcacgcggaaccggcaatgaaaccaactttgtgatgcagaaatttgcccgtgcagtattgggtaacaacaatgtggattgctgtgcccgggtgtgtcacggcccgtcagtggccggattacaggtgacattgggtaacggggcaatgagcaattccatcgcggatattgaacactccggttgcctgctggtattcgggtataactgtgcggattctcatcctattgtcgcccgccgggtgataaaagcaaaagagaacggcgcggaaattattgtctgcgacccgagaaaaatagaaacagctaaaattgccacacaataccttcctctgcggaacggtaccaatatggcgctggttaatgcgttcgcctataccttaatcgatgaaaatctgtatgacaaaaattatgtcagccggtttacagagggatttgaggagtacaaaaaagccgttcaggattacagccctgaagtggttcaggatattaccggcattccggcctcacaaatccgtcaggcgatgagaacctatgcgcgtgcaaaaaccgcaaccattatgtgggggatgggggtgacacaattcgggcaggcggtggatgtcgtcaaaggcctttccggactggcgttattaaccggcaatctgggaaaacccggtgtgggggttgcaccggtcagagggcagaataatgttcagggtgcctgtgatatgggggtactgcctaatatgttccccggctatcagaatgtgacagatgaaaatgtcagacgtaaatttgcgcaggcatgggggatcccgtatgaatcccttgaccctgaggcgggctaccgtattacggaagtcccgcatctggccattgagggaaaggtaaaagcctattacatcatgggggaggatccgctgcagacagaagcggatttacaactcgtccgcaatgggtttgatgccctggaatttgtggtggtgcaggatatctttatgaccaaaacagcggagcaggccgatgttattctgccgtcaaccagctggggtgagcacggcggtatctttacctgcgcggacaggggctttcagcggtttgagaaagccattgaaccacagggaaatgtaaaacgggactgggaaattatcagtctgctggcgacagagatgggatacccgatgtcttatactgacaacaaagagatttgggatgaactcagagaactgtgtccgctgttttacggtgtcacctatgaaaaactggaagggctggcacatattcagtggccgtgcccgtcagaagatcatccggggacaccatacctctatcagaataacgtctttgataccccgtcaggcaaaggactgctgtttgccgcaccgtggcggaagccggcggaactgccggatgatgaatatccgctgatcctttccactgtccgtgaggtcgggcactattcatgccgttctatgaccggtaactgtaaggcgctggcatctctggctgacgaaccgggatatgtgcagatgcatccggaaaccgcaggaaagctgggaattaaagaccaggatattgtgtgggtggagtcacgcagagggaaagtgatgtcccggtgcagtatcaatgaaacgattaataaaccagcggtttatatgacatatcagtggtggattggtgcctgtaatgaactgacacaggataatctggatccggtatccaaaacaccggaaactaaatactgtgcggcgagagtgatcagaattgataatcagaaagaggccgaagctctagtcaaagaaaaatatgctgtcatgcggaaccggttaatcggtttagttgaaacagcagaaagccagattcaataaacggaatacatttaataccatgtgaccacagggtgttttacagcactctgtggttttttataccacatcattactgaatgaaacacaaaaagccggcagccgccggatgcagatgagtcccctgtgattactggtgtcatcgtcagccggaaaatgtcccctgccggttatttctgcccgcacataaaacaatatttccgttttctgtgattttcctcaaataatcaaaaagatatttcgctaagatagcgctcttaaaggagcgatgtctatgataagtttatctcatctatccggtttattcttaggggtattactgggttttgttatgcagcgcggccgcttttgtttagccggtggtttgcgcgatctctatctcttccgcgacagcagaatgctgattgctattctgattgtcatctctgtccagagtatcggactcttcattttttcttatttcggtattgcaaaaatccccggaggcacatttccctggctggcaactctggccggcggattactttttggcatggggatggcatttgccgggtcctgctcaaccggtgcttattaccgggctgcggaaggattggcaggcagcattacagccgtcggcggttttattattgccagctggtttatccgtcagtctgccgtaaaacaggtcttttctccggttaccacaccgaagctggattccccgactatcacacaatcactgaatatcccgccgtatatcgcgattattgttttggtgctgctgacggtttttctggtgaatcgtcacctgaataaatacaaatctgttcacattcccaaaatgaaagcccggaaaaccggggtcgctcacctgctgtttgaagcccgctggcatccgtttgtttctgccctgataattggtgtcattgctctgcttgcctggccttcaagcctggcggacggacgtgtcggcgggttagggatcagcggcccgagcgcacaattattttcactggtgacggccggcgacctgaaattctttaactgggcgggttatctgctgatcgggatttttgccggggcgtttatcgccgcaaaaggcagccgggaatttcgtttccgcaacccgggttttcccgtgatgataaaaagcctgaccggcggattactcatgggtatcggcagcggccttgccggcggctgtatgctgggaaataccttagtcaatacggcctggttctcctggcagggctgggcgtttattccctgcattatcgccggcagctggattgtcagttattttacgatcatacgtcctcagaaaataaagtaataaggtgaaactatgaatacgctggaattagatacccgcgggcacctgtgcccctttccgttaattgaagcaaaaaaagccattgaaacattagcgaccggtgatgtactggtcatcaaatacgattgcgctcaggcgacggaaaatattccgcgctgggcggcagaagccggccatgaagttactgattttgaacaaatcggtgatgcgcaatggcggatggaaattaaaaaagggtaacgaaatgatggcggcctgaaaatcgttgcacggaacttttccggacagaaaaagacggaattgttcacaggcaaatttgaggtcgcatcgctcaccggtacgcagtgaaacacgttcttattcctgcatctgcgccgttaatacactgaccttctctttcagcagattcgccatatccccgccgtgaccatcgagtattttaccgatatcctttagtttgacgcctatctgccgcaatatctgaatctgggtaaggcgttcgatactgtcagtccggtcttctcagcaatttcaccaacctgaagtaacatatttccctcttgtaatgctgctcagactgcggccttacgtgacgtaagagtcaatacccgctttatattttattgatcctgttttgcagacaggtacacgtacagtattgtaccggttccgtataataatgagattcaaataaaaaaagcaggagtgatctttggttaccggaccttttattaatgccgccgcagtattaatcggcggaattgccggggcagggctgagccaccggctgccggaacgtatccggacatccatgccctctgtattcggcctggcctcgctcgccatcggggtgttgctgattataaaatgtgccaatatgccggtgatggtgttgtcggtgctgctgggggcggttatcggtgaactgtgttgcctggaaaataaaattaatgcggtggccggtaaaataaagacccggcttccggcacggggcggggctcaggaaagttttatcgaaaactatgtggtgctgatattcctgttctgtgtcagcggtaccggaattttcggggcgatgcatgaaggcatgaccggtgatccgaccgttctgctgaccaaggcttttatggatttttttaccgcgatgatatttgcctgctcactgggtattgcggtgtcggttattgccgcgccgatgctgattattcagctggcactggcgggcagcggtgcgttattaatgccgtttaccacaccggccatgatggcggattttactgcagcgggcggggtattattaatcgcgaccgggcttcggatctgcggtattaaaatgtttgcggtgattaacctgcttccggcactggtactggtgatgccgctgtcgctgctctggtcatctttctgaattatgatgtaaatcagccggatagatacagcagacggtggcagtctgtcatgcagggttattttttggttattgatcccgcaaaacagcatccggctgaataaattatctgcaaatacaggattggctgtttttatctgctttatttgaaccacttcaagaaattgaattacttctgaaatcacagggttataatccggaaaaccgattcagttactttccgtattcattccatggatgtcatcagtattatcatttcagcgggtaaatcctccgttgatgtcgcactttataccttattaccgattatggtcgtgatgctgatcataatgaaatacctgtctgtcagaggcgtgctggatgtgatagtccgctggctggcacctttactcaaacctttcggcttaaccgggatgagtgcattcgcgctgatccagataaactttgtcagttttgccgcaccactggcaacacttgcgattatggataagcggggtgtctctgatcgccatatggccgccaccctggcgatgtgttttgctatggggcaggggaatgtgttttatccgctgatgccgttcgggctgcactggacaacctccattattatctcggttgcagggggattgtgtgcggcggctttcacttggtatgtcaccggccgccggttatccgcaacagagaccgcaagttcagagccgctgccggatgcggagcagaataatcagggaattttgtcggttatcaacagcgcgggggcggatgctatccgtctggcactcggggctatcccgatgcttatcctgtcattatccattgtcggattaatgcaggccgccggggtgattgaatggctgcaccatattctgatgccggtactgaattttatgcatattccggacagttttgtactgcccgccctggtgaaatgtgtggccgggggtaccgcctatttcggggtgatttctgacctggtgcagcagggcgcggtaaccgccaatcagattaatgcgtctgccggtttactcatccagacatttgatttaccggggatcggaatttttctcggtatcagttcccggtttgtccgcttattccgttatgtgatcccggcagcactgatcggtattctcatccgcacggttttgcatatagtattattttaagccgcaggagataagtgatggatattcgtgaagatgaaaccagtttttatattctgtctgaggacggcaaaagccggatagcggaaatcacctttgtatataccggggataatctggtgattattgaccatactatggtggatgacagcctgcgcgggcagaaagtcggtaataagctggttgcggcggtggttgagaaaatgcgtcgtgaacagcggaaaattattccgctctgtccgtttgccaaaagcgtgtttgataaaacccgtgagtatgacgatatccgtcacgccggataatgcacaatgccggaggggaaaccggttttcccctcacggcacagacagagcagttaccatccgcagatattggtttcttcatccatatcgtagccgcggataatattaatcagatccttgacgatttgcgccgcgttttcagcatcagctaattcagcagcagaatccacgtctttatccactgacacaccattatttttattggtcatggtgaccatcagtgccgcatcattaatcttttctttgccgtctaattcactgaccagcaacgcgatttcttccgctgcaatctcagggatatataactttttcggattcagaaagagtttttccgctttcaggccgttactttcatttatcagctctaataaaaagcctttgttttcgtcgttcatgattgtgttactcctcggtcaggatctctggggcgacataaaaatcgacattgaacacagtatcgtcagtaaccgcttctatccggtgccaggtttccggcggaaagacaccgaactgcccggcttggattaccagggtgtctgttggttcagggctggtttcatccgcataggaatagtaaacaatcgtgccctgcataacagacagtttaggataaacgccctgacgggtgcctttatccagatgtctttgccagatagatttcggtgcggtttctttggtccagagcggggtgctgcggacatgaatgtagttagtcggaatgatgatgcgttccatctgtgttctcctgaagttaaacacatgattaaggcttaatcttaaaatacttttcaaaatttaaaaagtattttagatgcaacttcaggggaaacagcacgatttacccgctgacagccgggggctgtcagcagggcagacgccgggaaagagggctatgattaatcgtaggtaatcataaaagtggcatctgcgtcagcgatgccgggggtcgggcggtttccggtggcaatatagttggcataaaattgtgcctgaccgttgccgttaatatccatggcaattttcgggcttttggtttccaccggcagccggtttttctgactgtcgaggatctccaccgccacagagcctgcagcacttgctccctcatttattgccagcagtgagctgtcctgcttatctttcttaccgctgaagacaaaggtgacggcagaagagggcggacaattctgtaactgaaaactgaacggcatggattgtgttttatcaccggcggcgcggaaatttttcagtgcccagcgccccagttcgacttttttatttgcctgggaaacttcgaccccgcaactgtaagcgacaatttcaccggacaactcaatattgacccggccgagttcataagcggcggctgaatggatcagcagactaccgcaaagcagggggagcagagtctgtttaatgtgtttcttcattgccgtgcctgttattcgtagtcaacgcgtaaataaccgcgggattggaaaacaccttctttcggtttattaccggtcacactgacgggccaggcggtaattgctgtccgggcagaaccggcgccgtcgagctggaacggaataacactgccgatattattcggggttaatgcattaccgttctgatcaccgacaataaaaccgacatccgggttatcggagacaatcatattgccgttaactttttccgcttcgatacgcaatgtcagataggctttcgcttccacgttggtacactgaatcgcgatattttcgagttttttattcaccgtagcgggcttattaccggcaccggcctggctgaataattgtgaaccgattttaccgaagttaatcaccacaatatcattaaccccgactttgcattgctgcggtacattaataatgccgctgtaactgatggtataaaccggcgtgctcagcgggtcagtatttgccgtcgtgacatagacggtaaataaggtctttttcgggatcaccacctggtcaacgaaacggcgggtgactttcaggcggaaggtaaaattactgtccataatgccgaacggttttcccttggtcacgttcgggtgtgtgcccatcagaacatagtcctgcggcgggtaaaatgtaccggcagagctgtcggtaatactcatcgccccccgcagataatcattcagctggaggtatttataggatccttccgtttccaccaccggcatattggcgacatagctgcgcattgtccggttattgccggagtggacagggcatattccctcaacccgttcgctgaagtttttggttaacacttttacctgacccacctggttattggcggaggtaaagctgtcggtcagatcgtaaaagacctcactggttccgcccgccgcattactgcataccacagccagcgccggaagaggtaaaaatgccattaataacgggattgcgtatctctttttcatcattaactctctatttacattcaagcgcggtccgcagtaacggccctttgatttcctgacgggtaaaatcataatccgcggtgcactggtcacccggctgattcccccactgcaccagtaatttcccggtcagcggcaggccggttaaatacacacgtccgtcatcatcggcaatactgctgatctgagagccggtttcctgcaccatactgccgaagcggatcggtttgccgttgtgggtcagcgagagcagcgcccggatcccgatactggtatcaaacgtggcgcgggcaacagccccgctgatcggtaccacgttctgcacattatttttaatttccgtattgtcattaaatgaatccggattcagggcaatacggttgttacggtatgccgaggcataaggaataatggcgtaaccgcgccagtccgttttcaccccggtgtagttttccaccgccacaccggcggcacccggtgctttgaccagcacggtggtgtcattgattgactggccgaatgtcaatccgttttcatgcagcagcactgcgccggaggcccggtagttcagctgattctgatccgggtcgtagttatagctgatcccgaaatcgccgtaagtgccctgataatccaggcccgctgagccgttataaccctgctggctgacatgcccctgtgagacggaatagctcaggtttctgtcttccagcagtgtgccgttcacgccaacgcggtaagcctcgcggccgccggagttattggtggcggagaaggtggcatacgcgttattaaaggcatcattactgcgcgcattacgcgacgagaatgaggagaacggtacggacacattcaccgacagcatgttatcgcgctctttgagttccagcgctttggtggtactcagggaaacggaataatttatcccgttccagctgttggaatacccggcctgataccattcatctttaccgctgcggttccagtaagactgctggttaccggatatatagagcgagccgtactggtcaaatgattgcgagatattgacctggaagcgcccttttttgttataaagcaggttgtgataattaataatgatcggcttgccgtcatcaccatcctcgccgtccggggcaaattcatagccggacatctgcttatacgcgacatcgtttaaggtatagaagcccttggtggaatagcggtaacccaataactggaacgtggtcccggtggtgttcagggatttcgcgtacaggaaacggaaggactgcccgctgtgattcgagccgtccgccagttcactgtttgcatgggtgacatcgaaggagaaggcaccaaagcggccgatattctgaccgacacccaccagtacagatttatatttgtctgccagctgtgtcccggtatacacggagatatcccgtgtcagaccggcgagcagggtcgcctggacaaacttcggtttatcctggttgctgttaccgctgcggaattccccggccatcacatcatatttcacacggccttcacgctggagcaccggtagtgtggagtagggaacaatatactgctgctgagtgccgtctttctcctcgacggtgacctgtaagtcaccactggaggtggccgggtttaagtcatttatgacaaacgggcccggcgggacatagacctgataaatcacatagccgttctggcggataaccactttggcatccgtttttgccataccgcgcacggtcggggcatagccctgctggctgtccggatacatattatcgacagaaaacagccgcacaccacggaacccggcagaatcaaagacactgccgtccgagttgccgtcaccgataaccagctggcttttcagggcaataatcggccgctgaacatagttcatcaggctgcgccactggctgttactggtgtttttacttttgttgtaattccaggagcttgactgacggaactgccacgcaccaaggttaaaccccgagttcaggttcacgtagtagctgctggtattatccgagttgttattcccggacgcgaaatagttcataaacagtgccggaataccggattcccatctgtccggcggaatatagccgcgggcctgcccggaaagactggcctgagggaaactgagcatcagccgctgtttctgaaaatcaaagtgatattctgaaccgggaattttttcggtaaacgggaagcactgtttatcctgctctgttaattcctccggacgggcgatatttaccccgaaaccgataatggtctccgcactgaagcaggggaataaataaggctcaccctctttatttttcagttcggtaaaggtgatttcagaggaggaaacaaagtcattattaacagacagttcaaccaggtaagtaccgggcggctgatagccgcccgattcaaagcgggataaatcagagacatccgcgtcagacaggtcatcggttaaaaacgcggcgttaaaggaaggtttcgcaccggcggttcccgcagggaaaaaacacgtcaccgcggcaagcacagcaaaataaaccggcgtatgtgtgaaaacctttttgatgttactcatttcaccctgttccctgcatgacaacaataaaataatgaatgtcttaattcagattcacttcgcgctgtttgcgcagtccgccgtaatcattaattgtctgataagtcagtttacggccgtttttaccggcaatctgatgggtactgaatggcgcgaccatgacattctcaagcggacgcccgtctaaaataatattgacgaaagtggtgtaatacggcgtcgggttatcaatcgtaatcgtgccgcttttctgcgtgatggtaattttttctgccgcatcttctgtctggatcggtaaatttaccggtctgacgaacaatttaatccgtgacaaaatagccagctggagcacgttttttccttccagtgattctttatccacggacggaatcgcttttacgttcagccagaaaacagactcgcggtctttcggtaaatcctgagccaggttaaggaaggtgcgatttaatcagtcatgacgatccagagcctggatatcctccttacgcggcaaagtaagcaccccagtttggacaatatttaatctcccccatcaactcagggtaagcaaaatgtcactgctccactgatattacaatgattttcacgacatccccgccagttgtcccgcccgcaccaaattgcacattgcaaacagcattgaaagccggttgtggttcttcatcagtccccgtaatcgtgttttgctgaaaccaaactggcacttcagtatccggaaaggatgctcaacctttgccctaatacctgctttcacatattcatcatgcagcgcctgcttattcagccggggatgctgtctgagcttttttacggcatgaggacctttggcaataaaccactctttaacccgatgtgtcagagagtcccgtttttctgccccgcgatatccggcatcggcgaagacaattgctaccggctccgtaatcaggctatccgccgcattcaggtcatgcacatttgccgccgtggtcactactttttccgtcaagcctgtggccgcatcaacagcaatatgagctttcataccaaagtaccactgatttcccttgcgggtctgatgcatttcaggatcccgttgaccggctttattttttacggaacagggagcggaaataatggtcgcatcgataatgatgccctgacgtaacatcagtccggcctgcttcagtttctggttaatcagtgccagtatctgttctcctgcatgatgtttctccagaaaatggcggaaattcatgatggttgtgcgatctggcaccgtgtcacagatccccgcaaattgacggaacggcaggacatcatgcagggcgtcttcagccgctccgtcactgaggtcaaaccagagttgcaggcagtggatacggagcataagcaccagggggaaaggccgtcggccgcgacgggatgacggatagacgtgaagcagcttatcagcaatatcctgccacggcaccagaacattcatacggtcaagaaaacgggatttacgggaggaatagctggaaatggcaggcattgtaaacagctcatgataaagaaagctttatgttctcacatatgacgattaaatcgcaccttccctaagtaaagttagttataacgatcaaaggccaattattgattgatagaaactattgataatgattttttgatcgttgtaatcttttttatatgttaacaatttttacggttatcaaaaaaatatgtttttattttccactgattttgtaatttattgataaataagtaaataaaattaccattacatttatatttcttttgtaagtgaagattaccttcatttactatgcatggctactatttttacatatatgtgtttttaatctattgatttataaagtataaaaaataaataaaaaatttaatcaataattcatttttttgataaaatatcaataatgcgtgtatatcaaaaataaaataatgtaaaaacacaatttatcgttattttgttatgatttattgttttgtttttaaaataaagtcatcatttgcactaaaaatgtgtcgtgatgggtaaaattataaatttctgtgttttttaaacataaattatacacaataaaaacatatatttcataatgtaaaattataaaaatcattatacttcatgatgttatatcggtttaaatacaaaacatctgaaatattacaaattattaccacaatatgcctgttcacaagtttaaagcgtaaatgcaaattaacacatattatgagtaattacaggccgaatagtaatttatccgataaaaaagacagaatgtatcgcagtgtgaaaaaaaatcatatcaatcattatgttgtgatgtgcattgccggagggctacaggttattatcggcggttatccggaagactttagatttttcggtggttacgctataaaagcagaggggcggaatgccgtcatttttcattctgagaagggagagaacctatgataccggactacacagaaagcaattttgccggtattgagcacggtgacgggatttcggtgatccgtttttatgcaccctgttgtgagccgtgccgccggagtgaacaggagtttgcccgtatttccgggccgccgccggcttctgtcttcacacaagccgtacataatgcgttgttatagcatgaccgggatgtagtaattaatctcttccacatactgcaggccgttggcaataaactcatcatgccgctctgcgggcagcagtttatagtgttcaatatccgggccccgtctgcgcagcaggttcatttctgccagcgtaccggaataggcggcatgaataatattgttgtaatcagcgggcagatttttcagcatagccggatcaatggtaattctgagataatgcccgcccggtaaggtcaccggagaaagtgaagcgcggcggatgctgtccgctgataatacggacggaataaccgctgtggtataggcataactgatatcatctgcggttgattcatacggggcatgtatggcatacaaatccgccggaataatatccacttccttaaaaaacttctcccagaattcacgccggaatttccggttttcagtctgccagtccgacagatgtttccggtgataatgatgagagcccgctaacagcatttccggtaattcggtcagttcagactgaaacggaatcaggttttccgcctgtaacggaaaacagaagccgttactgtcccagcctgctttcttgcggtaggcggaaggggtggtattaaactgggatttaaaggcgcggcagaatgtctgctgtgaatcgaagcggtatttcaccgaaatatcgagaatactgctgcgggtaatccgcaatgcctttgctgcacaggataagcgccgggcacggatatattttccgatcacgacaccggtgtgctctttaaataagcgttgtaaatgccatttggaataacccgcccgtgcggcaatgatatccagtgataaatcagattccagattttgctcaatccacaacaccagactctgaataatacttccgcgaagcccgtctatgttcattctttttattaccggtaaagagtgttatcgctcagttatcgggcgatacaaaagttaaccttttaatattaaatgaatttaccttttatatccgcaaggagtgtaaatatctgtatgtagtgtgcagtggtttgtatttttttatcaggaattgtctgtttttgtgtgaatttgagacatacagacagaaaaatatcttgatccaccgaaaaacgtgcagctattaacctgaaaaacaacaaaattttaaaaaatcacaaaaaattataacttttgaattttctgccgataacagtatccgtatggccctgccagatcattttatcgccccttaaaggaaactgtatgcagttacttcgaaacttatccatccggttcgtcatgctgtcgatactcggtattttgtgtctgacactcggatgtgtcagtttttacagtgactggtcactgtcgagagtgtctgacggcaatgcgaccgatcgtcagctagtccggcagctgacggtactgaatcagggaaatgaccagtatttccggtttatttcccggctgaaccgcgaaatgcagaaaaaagcggaaggggaagaaccggatttaaaaccgtctgcggaagcgatggagaatatggggctgcacctggcggagatgaaacggatttccccgggaccgatggatgtacagatgtcagaaaaggtgattgcccgctggcaggcactctatgatgagggggttaaaatccagatgcagctggcggagcagggggatcaggcgggttaccgtaagcagtcccatgatgtcacaccgcagctgagcaaagaatttggtgctgccagccttgaatttacacaggtggcggagacgcggatcgaacagacccgtaccctggtggacggcctgatgaccaccacacggattgtgattatcagcggcacactgtttggtctgctgatcctgatttttgctgaccgctatctggtgaagatgatgcagcgcccgctgaacaatgtccgtcagcatttccgccgtattgccgggggggacctcagccagccggtggaaagtgacgcagccgggcgtaactgtgtcggtaaattgttcccgctgctcagtgagatgcaggacagtctgcgggatgcggtcagttctatccgtgaaggcagtgataccctgcgcgacagtgcttctgagattgcgcgcggcaatacggatctctcctcgcgtaccgaacagcaggcagcggcgctggaagagacagcggcgagtatggaagagatcaccgcgacagtgaaactgaatgcggatcatgcgcatcatgccagcgaactggcggaagtaacgtcctcaacggcacatcagggccatgagatgatcgctgcggttatccgcacaatggacgaaatttccgagagttcacgcaaaattgctgaaatcaccaatgtgattaacagtatcgctttccagactaacattctggcgctgaatgcctcgatagaagcggcgcgggccggtgtccacggacgcggctttatggtggtggccggtgaggtgcggacactggccagcaacagtgcggatgccgccaaagagattgaacggctgatagccaatgcggtgtcccgtgttgatcagggcattaaactggtcgccggcggcggggaaacgatggaggagattgtccgtgcctccggtgaagtcacggagatcatgaaagaaattgccattgcgtcagaggagcaaaccaaagggatcttacaggtcggcactgcaatcacccagatggacactgtgacccagcagaatgcctcgctggtcagcaatgtctctgaaaccgccgccgggctggaattacagacacaggcgctgcagaactccgtacagaaattccgcctcagtgctgcggactgacgcggctcagattgctgccgtggccagtaaatcgcggtagtaatctatctttcgttccaggtgctgaaaatgatcattcagcaccgctatctgctgttgtaattccccgctgtgtgccagcagtaaatccatacgcgcctgtgccgtttcctctccctgagcccgtaaatccgcataatgtctgatggatttcagcggcatgccggtttctttcagtcgggtgataaacgtcacccactccgcatcacgggcggaataacaacggtgattatttgcccggcgctgcgggatcaaaatgccttctttttcataaaaccgcagggtatggatactgaaaccggttaaggcagaaaactcactgatggaataatgcatgcaagaaacctcttgacctcgagtgaactctatcttttacgctcagcggactaatgtcaaaggaggtttgtatgaacaatcagaattatgtggtgatcaccggtgccagcgccggtatcgggcgggcaatcgcggctgctttcgcacgccggggtaataatgtggtgctggtggcacggcgtgaggatgcattactgacactgaaggcggagctgatgcagcagaacccggacatcatggttgaaatccgcgtgtgtgatttgtccgtgcccggcaatgcggcggcgctgtatcactcgttgtcttcattgaatattattgcgtggattaataatgccggtttcggctattacggtacggtggcagagcagccggtggcggaagcggagaagatgcttgccctcaatgtgaatgccctgatggtgttgtcggcgctgtatgtgcaggattatcagcatacggaaggtgcgcaactgatcaatatcagttcggcgggcggctatacgattgttccctctgcggtgacttactgcgccacgaagttttttgtcagtgcgtatacagaagggctggcgcgtgagcttatccgcaacggggcaaaattgcgggcaaaagtactggcaccggcagccacacagacggaatttggtcaggtggcgaataataccgattcttatgattatgaccgggctttcgggcgttatcataccagtgacgaaatggccgcgtttgcgcttgaactgtatgacgcggacagtatcaccggcatgattgaccgcgatgatttccgttttcaactggcggatacccggttcccgcatgcagaaaacagccggtcaaatcagaaagtgactccataagattctgcgggtgctgccgggatgattgctgtcacccggcgttactgataatgtgaggtaattctcatttttcaggttggaaaccttttttatgctgcaattacttccggttacctcaccggctgatccggtacttgatgatattcgtccgctgtatgaatccgcttttccgctgcatgaacagcgcacgcgggcagggcgggaaaaactgttttctcagccgggctattatctgtatcagataagggataatgaccgctttgccggatttaccggctgctggcagatgggttccctgttttatattgagcacattgctattgcgccgcagatgcgcggcagcggagtcgggcaacgggcgttgtcactgttttgtcaggaaaaacaacgggttgttctggagattgatccgctgacggatgaggtggcgcaacgccgtctgcgtttttatcagcactgtggttttgctgttaatgactatattcatcatcacccggcttaccgcccggaatttccgccgcatgagctggtgatcctgagttatccgcaggttattaatccggaagaatatcagcaatttaagcactttcttatccatcacattatgccggaaaatctgttgtagcgcccggctcaccgcatgttatgatgaccgcttttccggcggtctgcctgccggttcccgtaccgtactctgctgacacctgttgtcagcggagatgactttgcagggttgtcatgaacaagaaaaaatgtgcggtcagtgagctgctcagcggcatgccggatctcccgtttgaaacggtttctctcagtgagtgtgatttcacggcggtgtctgtgtgtctggtggcaccggcagataccggcaacggccagctggcgcggatccggcaacagggcttcggccagccggtttttatggtgctcagcggcggtgacgcagaggcgctgccggatggtatcagcggagttatcgatctctgccgcgatgacagccgtacggtcggtgacacacttctgcgtgcggcacaatcctgtgaagagagtctgctgccgccgtttttcgggcggatgaaacattataccgcgcagcagaatatctcctttgcctgtcccggccatcagggcggggagtttttccgccgtcatcccgccgggcagcagtttaccgactatttcggcgatgcattgttccgggctgatctctgcaatgcagataccgcgctgggggatcttctgatccacgaaggggcggcgctggccgcgcaacagcatgccgcgaaagtctttcatgctgataagacctggtttgtgctcaacggcacgtcgtcatccaacaaagtggtgctgaatgctctgctgacaccgggtgatctggtgttattcgatcgtaataaccacaaatccaaccatcacggtgcactgatccaggccggtgccacaccggtttatctggaggcggcacgtaacccgttcggttttatcggcggcattgacgcacactgttttgatgaggattacctgcgggcactggcggcggaagccgcaccggaaaaagcgggcgacaaacgtccgttccggctggcggtgatccagctggggacgtatgacggcacggtgtataacgcccgtcaggtggtggacagcatcggcccgctgtgtgattacattttgtttgattccgcgtgggtcggctatgagcagtttatcccggtgatgcagatgtgttcaccgatgctgctggaactgaatgaaaacgaccccggcattctggtaacgcaatctgttcacaaacagatggccgggttctctcaggcgtctcagatccacaaaaaagataaacatatcaaaggtcaggcgcgttatgtctctttccggcagatgaataacgcttttatgatgcatgcctccaccagcccgttttatccgctgtttgccgcactggatgtgaacgcgaaaatgcatgagggcgaacccggacggcgtctgtgggcggaatgtgtcagaacggggattgaagcccgtaaactgctgctgcggacgtgtcagcatatccgtccctttatccccgctaccgtggacggtcgtccgtgggaagaggcggaaaccggtgttatcgccgcagaccggcgttttttcaattttgtaccgggcgagcgctggcacggttttgagggttatgcggacgatcagtattttgtcgatccctgcaaattattgctgaccacccccggggtggatgtcagcagtggagagtatgaggattttggcgttccggcgacgattctggcgtattatctgcgtgaaaatcagattatcgcggaaaaatgtgacctgaattccatcctgtttttactgactccggcagaaacgccggaaaaaatgcagcggctgatccggcagattgcccggtttgagcagctgctggacagcgatgcggcactggaaatcgtcctgccgtcactgtgccgcacgtatccggcgcgttatgcgggatatacactgcggcagttgtgtcaggaaatgcacaatctgtttgtgaaacataatgttaaacagcgccagaaagagatgttccgccgccgctgttttcctgcagtacggatgtcgccgaaagcggcacatactgaatttgtccgcggcaatacagagcgggtggcggtgtcagagatagccggacgtatcgcggcggaaggggctctgccgtatccgccgggtgttttgtgtgtggtgccgggggaagtctgggaagccccggttcagcgctatttcctcgcgctggaagagactgccgaccgctttccgggcttcgcaccggaattgcagggggcgtatattgagcaggatgacagcggacaccagcgtgtgtatgcctgcgttatccgtcatcagcagggagaaggacaatgacagcagaacagtttcatcagcgtatatgggaaattctggaagatctcaacagcgactattttcaggtggtcgccgcccccgcaccggagccgcaggctgtcgcagcagcagaggcactgaccggcgtgccggtaccggcgtattactctgcattctgtcagcgcaccaacggtctgtgcgtgatggcccgggaggagttctggccggaagcggaactctattctgtgggaccggcatggacgttctggcgcggtgtggtattgctcggattcgatagccccgatctgccggagtgggcatccgtcacggcggcctgtgagcggctggctgattacgaagttaccggtgtgctgccgctgatgaaagtagtcggtgacggcaatattatctggggcctggataaatccggcactccggttgaggtggcggaaggtgaaattacccggctgccggcggactttaccgtatgctatgaggaacaaatccgcggtctggcagagcgtcagtcagagatgatggagcggattgcggagcagaaacgcccggcagctgaataaatcctcactttccattcctgttggttatcggacgaatcagataactcattatacggactctctgtgctgtggtgtgataggggcagagagtccattctgatgaggaaatgatgatgcctgttaacacaccctccgcactgcgggtcgccactgtgcagtttcagcaccgccccggcgacaaagaatacaatcttgcctgtattgataagtttattgagcgcgcccgcacggagcaggtgcagattcttgtgctgccggaaatgtgcatcaccggctactggcatgtgacaaaactgccggatgaggatgtccgcgcactcagcgagccgctggcggacagcccgtcactgcggcatctctgcgcccgcgcccgggaaaccggtatgattatcggggcggggctgattgaagacggcggtgacggccattgctataacacctatgtggcctgtatgccggatggcacttatcatgcgcaccgcaaactgcatgcctttgagcatccggttatccgcagcggtaatcaatacaccgtatttgatacaccgtggggtgtgaaagcggccattcttatctgctgggacaacaatctggtggaaaacccgcgtgcctgcgcgctgatgggtgctgatatcattctggctccgcaccagaccggcggcacctgttcacgcagcccgtacggaatgaaaccggttccgctgacactgtggaaagaacgggataaacatccggaagcgttacgtgcggcttttcagggagagcacgggcgcggctggctgatgcgctggctgcctgcaagggcgcatgataacggggtattttatctgttcagtaacggtgtggggcaggatgatgatgaagtccgcaccggtaatgccatggtgattgatccttacgggcggattgtggcggaaagtcaggctgttgaggatgacatggtggtggctgatctcgacctgacactgctgccgctgtccaccgggcggcgctggataaccggccgccgtccggagctgtatcagatcctgacacagcgtcagggttatgaacgggatgcgcggacagtccggtttgcggaagacgctgtggtggtcgctccggcggaaccccggctgaaaggatgattgcccggtgatgccggtcaggttatgctcatgaccggcatctcagacaggataatcagcatggatctgcgtttactgcgggcatttgtgactctggccggttgcggacattatcatgaggcggcatccgtcctttgcattacccagcccgcactgaccaaacagataaaactgctggagaacaggctcgggctgacactgtttgtgcgcggacgacacggtgctcaactgacggcggagggcgctgaattattaccggcagccacggcgctggtgacacagagccgggagtttatgcatcatgcggcgcgactgagccgtcagttaccggcgcggctgaatgtcgggttcggtatttcggcatttaaagaagcggctgaatttgtcagccggctgcaaagaacgctgccggatgtgcaggtgtctctggatgatttcccctctcaggtgatgactgaaaaattactttccggtgaactggatatcgcctttatgcgcctgccgctgccggaaaatacggttcactgcccggaagctgtagcctttaagcaggaaacattatctctcgcggtaccggccggaactgtagtgcagcccggtcaggaattgtcactgatcacccgcaatccgctgctgacattgcatgaaaaccggggcgcggggctgtatcaccagataacggcatttctggatgctaatcatgttaccccgcaggcggtgcactacagcagtgatatccggacactgattgccctggtggcggccggtgccggtgtcgctctcctgcccggcgaagccggtgatccggggcatccggatgtcacgttttacccgctgactgactttgcacaggcatcctggaagatgggtatggtctggcggcgtgagttaccgcttctctggcggcagcagtggcgcgagtggctgacagtaaaagatcacccgttcggtttcagtaaacccgggagcccggtgtaaccgctgcgacgcggtgttatccggtgaggtatcggaggccggttcgcggcagccgttgacataatctgtccgcacagaggcttccgcaaacgcggcggtttgcccgtctgcggtgcagaggaaaaaggcacacagtgacagattctggttctattatgtattctccgctgtgtgagcaaatgcatgacaaaaccagtcactgacggcgctgatcatcgcctgatcggcactgtggcggttatgcagcagataaaatcctttgccggaatgcagtgtcagttccggaaacaaaggaataagggtctgttgtgccagctcgtgttccagcaggaaatcattggcaatcagaataccctgctgatgcaccgccgcatcaatcgccagtaagaactgatcaaaatgcagcccggcggtaaacggtgtgccgccggacgctatcccggcatagtgttccagccagctgtcccagtaaggatagagtgtggtgtgcagcagtaccgcatttttcagatctgccgggctgtgaagtgacagccgcgtggcataagcgggatgacaaaacagacggcagggcgcgtcagataacagtacccgcgccggttgcgtgcgggataaatcagtatagcggacagccagatccacattgtctttttccaacgaaaccagcgctgcggtggcattcagatgcagatccagtcccggaaaagtgcggacaaaatcactcatcctgggggagaaccatttggaggccagcccgggcggcatggacagagtcagggtatggcgtgccgcatagcggattgtctcaccggcggcgcggatctgttccagcgcgggctgaatcaagcgatagtatttctgtcctgtctctgtcaccgtcagtttgcggatctcacgcagaaacaacatcacgcccagctcatcctccagcttttttatctgctgactgaccgcacccggtgtgacatgcaggaattctgccgctctgataaagctgccgagccggacgctggcttcaaaggccagcagggctttcatcggcggataacggttcatgaaatagtttttctctttcataaggtaatttaaatcggttgtagcacagccccggattcagaacaatagccccatcagaaaaaaggggtagcaatagtatgaacagtaaaacggcagcagccttcgcgttcctcggcattatctggggaaccaactttatttttatgcgccaggcgagtgagtggatctcgccggtacagattgtatttctgcgggtgttatgcggctttgtgccgattgcggtgatggcgtggatgcagaaagcagtgcgccgcgagcacctgaaatacaccgggcatttcctggtgatggcgcttctggccacggtgatttattactgggcgtttgcttccggcacctcattactgctctccggcgtctccggtgtgctcagcggggcaattccgctgttctcgtttattgtcgcggcgatttttctgcgtcaggaaaaaatcacggtaatgcgtctgtgcgggctgatgcttggctttgccggagtgattctgatcgccaagccgtggcaggtcagcggggagagtatcagtctcgccggggtgggttatatgattctgggatcactgagcgtggggatttcctttgtgtatgccaaaaaattccttgcggataaacagattgctccgctggcgctgaccacctatcagattggccttgcgttggtgatcctggcctgcatcacgccatttaccggcattaccgccattgcgcaggacagcactgccagcctcgggctgattatcgggctgggattgctcggtaccggggtggcgtatctgacgtattactatctgatcctgaatctgggggctgtagtggcttcatccgtgacctacatcccgccggtggtggcactgattgtcgggttcctcgccgccaatgagcagcttggcgtgacagagattctgtcgatggtgctgattatgagtggtgtcttcttattacagcgtccttcgcgccgcccggaagcggagaaggaagctgaagctgtgcagtaatattccgggaaaccaaacctatctttttattgtctgttcgatttgagttgcatttcctgccccgctgtcagtatcgcggggctttttttcacccgcaaactgcatcaccagcacacccgccaccaccaggccgataccggcgagtttggctatctgaaccggctgtttcggcattccgaacaaaccgaagtgttcaatcagcgcggaaatcaccagctgaccggcaatcaccattacgaaaaaggtaatgccgccgattttcggtaccaggatcagagcggaggtcagatacagcattccggctatcccgccgagccagatccagaacggctgatgcagtaaatctgcgctcagcaccggtttcggaactttaaatattaataataacggtgctaaaacaataatactgattaataatgatacaagactggcccataacggatgacccagatggcgtgctaacactgcattgctgaccgcttgcaccggtactatggcaccggcaaaaaaagcacaaataatcaaagcaatagcggataatgataaggttgacatagtggcctccctggttaacgttttattaacatcaatcataggtgatccccggcagaaccggaaatgatcaattttatagggcactattcgtattatgaataatataaagaaattagatttaaatcagcttgttacattgcatgcgttactgcgtgaacgccatgtcagccgggctgccgtgtctctgcaccgcagtcagccggctgtcagccacacactgaaccagctgcgggatttgtttcaggatccgctgcttatccgcagacaaggccgttatcatctgtccggtaaggcggaagcactgtatgcgccgctgacgcaggctctgagtcagctcgatgacctgatcgcacagcaggatttccggccggaaaattgcacccggcggtttaatatcgctatgtctgattacggggcggcgattttcagcggaaaactcatccgttatctgcgcagttccgcgccgcaggtcgatttgcaaatctggcagggcagccgcgaggagatgcagggaaaattgcaggaaggcagcctcgatctggcattcggggtatttactgccacggattacactctccgcacaaaaacggtctttacggacaccatggtcagtgttgcggacaaacaatactgtaccaacggcacgatgccgatggcggactggctctcgcacccgcatatcctggcgagcatgaagccgtatgaagccaatgaaattgaccggcagttacagctgctcaattaccggcggcgcattgcggtctcggtgccttactggcagattgcctcgcagttaccggaaggcactgatctgatcctgacggtggcgcagcgggcgctgccggatatactcagcccgtcattacaggtatttacgccgccgctgactatcgcgccgctcagttttcagatgttatggcaccagcgcagtgaaggggatgcggcactcggctggctgcgggaagtggtgatgcgggtgtgtgactgatgctcagtgtgttgtccggcggcagttttgcagttccagcagaaatgagccgttattaccgccggtgcgtttatttaagccgaaaacaaagcgccgctgtgacggtgtgaaataagcgagtccgctgaaggtaccggcataaatcagggtatcttcgccgatctcctgtaaatcctgctttgacatggtggcaaactgtttaatcggtgtcagtgccggggaatgatagggggacggttgcgtatccagcaccgtaaagcggtcattatgaaacagaacgacggattcacgctgtttatccggaaaataaaaatcgcgcattgcgccctgttttcgctgataactggcggatgaaatctcacatttgtaatagccgttcagtgaccctccggcggcataaccggataaagagacaaaaaataataagaaagttaataaacgcataaacaggatagttgtttttacaaatattaagtgtaataggatgcggttatccgcacaatcagttcagtacaatcttccggaaatcagcggaaagaataaagggctgaatacgcgtaaaatgcaaattttataagtacatagcgggaaagtttgtttccgtaactatcatccggatcatatatccgtttatcagagatcggcgtaaaatagcggctgatatcattttttactgacggatccccctatgctggcgaagtttctcccgatttttctgcttgttctctccaatatttttatgatgtttgcctggtacggacacctgaagtttgccggtaagccactcattgcggtgatttttttcagctggctgattgcgctggcggaatattgtctggcggtgccggccaaccggataggacatcagtactacagtgccgccgagctgaaaaccatgcaggaagtgatcactctgtgtgtctttatggtattttctgtcgcttatctgggtgaaagcatcacgctgaatcaccttatcggtttcggatttattgccgccggggctttctttatttttaaaggaccgttttaaccgccaccacacaatgacgataacgatactgtgaatttatccataatatagcggggtgactggttatatcaccaggtattattgccgggtatagcgcccggtttccgggatactttttcactctgatcaaggcaggtctgttatgtcatcactacgtttatcttatccgaaactcagtccggcagcgtatgcggggctgattgcctgtaaaaatgcactggaaagcagcgcgttatcccctgaactggttgagctggtgtatctgcgggtatcccagattaacggctgcgcattctgtctggaaatgcacacggcggcactgcgcaaacggggcatggttcaggagaaacttgacgcactggcgggctggcgcgtgagtgaacgtttcagtgatcgcgagcgggcggcgctggaatggacggaagcggtcacactgttatcggctcagaatactgatgatgcaacctggcagcgtgtgaaggcacatttttctgatgcggaaatgagtgatctgacaatcgcggccgggctgatgaatgcctttaaccggattgctgtcagtctgcgtcagtagcagatagcagcaacccggcaccggcggttattcgccggtgttatcccgcagccacggggtgatagtcagcccgacaagtaaaccttccgggctgagcagacgggtgacggactgtccccacggctcggttctgtttgccaccagcagcggatagccctgtgactgtaaaaattccgtggccgctgccaggtcgcgcacttcaaactcgacccacgcctgcggcaccggatgtgacggcggccagctgtcctgcccgaaacaggagaccgcagcgtggctgagcggccagagcgcgaagtgtttcacaccgtgcaggctgtgatcggcggtcaggtaatcggccacgccttcagattcactgagcggcaggccgacggtatccgcaaaaaaatgtttgctgcgggcggggtcgcgggtcaccggaccaaaaccggcgacaaacagcacaccgggaacggctgggtaatcagacatagcagtgtctccgtaagataaggatttatcccatcttacacattaatctgcccgggtgccggaaatatcatctcttcatacggcgcttcgcggcaggcatccagccgctgctgtattccgccggaatgcgcctcaagctgatgcccgtccgggtcaagaaaatagacggaatcaccttcactgcggttacgtttccagagtgttatctgatgagcggcgagaagcgagcggaaggccgggaactgctcaggaggaagggtgaaagcgtagtgggtataaccctgatgaataggccggtgaatgatttccggatctgccgataaacagatccacagttctccgcaggtcaggtaagccccgtatttccagcgggtatgcagcgtcattttcagaatatcgcggtaaaaatgcaggctgcgatccaaatcggcgaccgccagggtcagatgattcattcctgttaacatatatcctccgtcagcatccggctgttataaacagcacgtctgagtcaggtgaaaggaagccgtatcagtggttgtacggtggggggttatcatcatcaggaagctctcagggtaaaatatcagtcaggtttatgattaccctgaagcttactgactgacaacgcagggtgccagataattccgttgccgggcgttgtgatttaagatcacgttaatttagtcccgtcagggatattcaccctgaatatgatttacctcaattatccttattattaataggtctactctggcgccacactttaataatgataatggtaggtctacttatgtcattagtcacacaacttccgtcgatcttttctgatttctccgatgcccgccaacagggctttctcactgtaatggaactgaaagagcagggtgtcccgctggtgggaacctattgcacttttatgccgcaggagattgctatggccgccggcgcagcggttgtctccctctgttcaaccagtgatgaaaccattgaagaagcggaaaaaaccttaccccgcaacttatgtcctctgatcaaaagcagctacggattcggtaaaaccgataaatgcccctacttctatttttctgacatcgtggtcggtgaaaccacctgcgacggcaaaaagaaaatgtatgaatatatggcggaatttaaacctgtccatgtgatgcagctgccgaataacagtgaaagtgcggaatctgtcgcgctctggcgctcggaaatcatccgttttcagaaacggctggaagcgcagttcggctgtgaaattacagagcaggggatccgtgatgctatcgatctgcgcaaccgcgaacgccgtgcattaaccgaattttaccacctcgggcaactcaatccgcctgcgatgaccggccgtgagatcctcagtgtggtctatggtgccaccttcaaatttgataaacgcgctctgatcggcgagctggaaacgctgaccgccaaagtgcgtgcggaatatgctgccggtaaacggctggatccgcgtccgcgcattctgatcaccggctgcccgattggcggggcggcggaaaaagtggtgcggattatcgaagagaacggcggctgggtggtcggttatgaaaactgcacaggcgcgaaagccactgaacagtgtgtggatgaaaatccgcaggccgatgtttatgatgccctgaccgaaaaataccttgctatcggttgctcctgtatttcaccgaacacacagcgtctgaatatgctcagtgagatggtgcaggactatcaggtggacggggtgattgatgtgatcctccaggcctgtcacacctatgcggtggaatcgctgctgataaaccggcatatccgtgaaaaacacgatatcccgtatatggcgattgagacagattattccacctctgacaccggtcagcttgctacccgcattgccgcttttattgagatgttataaggaggcgtcatgctgagtatcggtattgactcgggctcgacggccaccaaagggattttgttcagtgatgaagacggcggcgtgatcctgcgccgcttcctgatcccgactccgttccggccgcagtccgcgattctggaagcctgggaaaccctctgcggtgaatgtgacaccaaaccgtatctgaccctcaccggctatggccgcaagctggcggactttgcggacaaacaggtcacggaaatctcctgtcacggtatcggggcgcgctggctgcatccgcagacccgcacggtcattgatatcggcggccaggacagcaaagtgatccggcttgatgaacaggggcatctcacggattttctgatgaacgacaaatgtgccgccgggacggggcgttttctggatgtgatcagccggacactcggcacggatatcacggcggtggatgacaccatccgcgggattgagccgcatgctatctccagcatgtgtacggtctttgccgaatcggaagtgatcagcctgcgatctgccggggtggagccggagtcgattctgtcgggaattgtgaattcaatggcacaacgtaccgccgggtttgccaagcggctgagtactgtgccgtctgtgctgttcagcggcggcgtcagccgcagtcagacgttctgtgagcggctttcacagcacctgggggcggaggttatcacgcatccggacgggcagtttgccggtgctataggtgcggccatttacggcatctgtcagttacagaaacaggccgtcatgacctccggggatatccgttcatgaatgactatctgattttatttgaaaatatgctcggtgtggtggcgatgcgcaagcatctcacagcggccgggcagcctttcaccgtgacggatatcccgccgtcactgggcaaagcctgtggtctggggatccgcctcagtgtcagtgatgattcactcccggcactgcgcgaccgtccgcaggtcacggaaatataccgctgtgaagcggcggaatatgtactgacggcggcggagtaaaccgcgcttacagacagataacaaaccacaatcacgataatccggcattttttattctgttatgttgtaaaaaataataaaaatgaagggtcttattgtgagtaacgaaatacatagcatgatcaccactgatgccaatcaggcggtggcccggatggcgtatcagctgaatgaagtgatcgccatctatcctattaccccgagttccaccatggccgaatatgctgaccactggtccgcgactggggaacccaatttgtggggcgatgtcccgcgcatgatggaaatgcagtcagagggcggagccattgccaccgttcacggcgcacttcagaccggcgcattgtcgaccactttcacgtcctcccagggattgctgctgatgatcccgtccctgtataaaatcgccggtcagctgatcccgtttgtcctgcatgtggcggcgcggacggtcgcgactcacgccctttctattttcggcgatcactcggatgtgatggcggtgcgtcagaccggctgtgctctgctgtgtgccaacagcgtccagcaggctcaggactttgcggtgatttcacagatagccacactgaacagccgcgtgccgtttattcatttctttgatggtttccgtacctctcatgagatgaacaaaattattgctgtcagccgtgcggagctgagcagactgatcccggcagaggcgatccgcgctcaccgcgacagagcactatcgccggaacatccggtaatacgcggcacatctgccaatccggatacctatttccaggcccgtgaggcgactaacccgtggtatgacgcggtttatcagcatgtgacggatgcgatggctgcatttggtgaggtgacaggccgttattatcagccgtttacgtattacggacatccgcaggcagagcgcctgattatcctgatgggatctgccgcaggtccggcggaggaagtggcagacaaactgattgcgcagggcgaaaaagtcggcgtgctggaagtgcatctctaccggccgttctccgcacagcatttcctcgataccattccggacagtgtgcagcacattgctgtgctcgaccggaccaaagaagcgggtgcccaggcggagccgctctatctggatgtgatgaccgcctttgccgaagcgtatcagaacggggaacgggcacagctgccgcgtattatcggcggacgctacgggctgtcatccaaagagtttgacccggactgtgtgatggcgattttccgcgaactgacgttaacctcgccgaaacgccgctttacgtccggtattattgatgatgtcaccgggctgtccctggcaccggttccggcggagctgccggtcacacaccgcctcagtgcgctgttttacgggctgggcagtgacggtacggtttcggcggccaaaaatgccattcagatcctcggcagtcacacagataattacgcccagggcttttttgtctatgactcgaaaaaggcgggcggccttaccgtttctcatctgcgcatcagcgaacagccgatccgcgctacctatctgatccggcaggcggattttattgcctgtcatcagtggcagttcctcgacaaatatgaaatggcggaaaaactggcgccgggcgggattttcctgctcaacagcccgtatccggcggatgaggtctggcaccatatcccgcaggatgttcaggcgattctggcggagaaacaggcgcagctgtatgttatcaacgcctaccgcattgcccgtgaatgccgcctcggtgcgcggattaataccgttatgcagatggcgtttttccatctgaccgctctgttaccggcggcggaaattcagtcttatttacagcaggcgatcatccgcagctacagcaaaaaaggggaaagtgtcgttcaggataacctgatggcgatagcccgcaccccggaagcactgcaccgcgtgccgttacaggcagtggatccgcacagtcagccgcgtccgccggtcgtgccggataacgcgccggactttgtcaaaaccgtcactgccatgatgctggccggacgcggcgatgccctgccggtatcggcattcccgccggacggcacctggccttccggcaccacccgctgggaaaaacgcaatatcgcagagatgatccccatctggaaaccgtctctctgtacccagtgcaactattgtgtcgcggcctgtccgcatgcggctatccgcgccaaagtggccgatcccgcggatttcagcggtgcaccggatacactgcagcgtctgccggttaaatcccgcgatatgaaagggatggattatgtccttcaggtcgccccggaggattgcaccggctgtaatctctgttatgaggtctgcccggcaaaagaccgggaggatccgtccgtccgcgccattaatatgcagccgcggctggcgcacctggcagaggaaaaagccaactttgatttcttcctgcaactgccggacactcccgcatcccggcttgagcgcattgatatccggacatcacaacttatcacgccgctgtttgaattctccggcgcctgtgcgggctgcggtgaaacgccgtatatcaaactgctgacccagctgtacggcgaacaactgctgatcgccaatgccaccggttgctcttctatttacggcggtaacctgccgaccacgccgtacaccaccaataaagagggacgcggtccggcctgggccaactcgctgtttgaggataatgccgagttcgggctggggttccgcctgacggctgaccagcacaaaaaacgggtgaaacgtctgctgatgacctttgcggcccaactgcctgatgaattacggcagcggctggcggatgagacactgtctgcggatgaaaaacgtgcggctatcacggaactgcggacattactggcggataacccggatccgcgagcccgtgagctgtcagaggatgcgcattaccttctgccgaaatccgtctggctgatcggcggtgacggctgggcttatgatatcggctttggcgggctcgaccatgtgctgagcagcggtgagaatgtcaatgtgctggtgctcgatacccagtgttactccaacaccggcggccagcaatcaaaagcgacaccgatgggagccgtcactaaattcggggaggagggtaaaggcaaatcccgcaaggatctgggcgtgtccatgatgatgtacggcaatgtgtatgtggcacagatagccatcggcgcccagatgaatcagacggtgaaagcgattcaggaagcggaatcctatcccggcccgtccctgattattgcctacagcccgtgtgaggagcatggttatgatctggcattcagttacgaccagatgaaagccctgaccgccagcgggttctggccgctgtaccggtttgatccgcgtcgtgacggaaccggcaaagcgccgctggtactggattcccgtccgccgtcacaatccctggcggaggtgatgcatcaggagcagcgttttaaccgcctcagcagcagtgatccggcgagagccgctgttctggcggaaaaagcggaacaacggacggcaaaacagtatgcactgcttgaattgctggcctcacagaaatctgaaccggccggaaccggcattgttcaggaggatgcctgaacgtcatgatgacaaataaccggagcgccggggaaatatccccggcaacggaacaggatctcacggcgttaattgcccttgataccgttgcggcacaggagccgcaacggtgtgaggcgatccgccgctggattgagcagaaaatctgttttgtgctgcggtgtgaaggcaaaattgccggttacggcgtgctgcattatcacttcaaaaagcagtttatggaattaccagctgatgcacaggatgcagcctgtaaacagggtattgatgcgttagcccgggctaaagctatgatggaacagcaaatgccgaaataacggccgctgtgattattgacgggctgtatgatacagcccatttttgtttttcagcgggatgaaaactgtttgcggcgtttttcatatttcgccggattgcggtgaaaatgacgccagtgaggttcgcctgcggcatacagcagttcataatccccccgtgaatcgccccaggcacgcatatggtaagcggataaatcaccgtaaacctgttgcagccgggcaattttctggccgcagcggcagttgttgccgttgattttcccggtcagaatgccgtctttttcttccagctgagtcccgataagtttgatccccagccgctctgtaaacggccgcagcaccagctccggggatgccgaacagagtgtgacttccgcacccgatgcaatttccgctgccaccgcgcgcagaccttccgggcgcatcatcttatgccagtaacgttcacaaaattcctgtgcttttttctccacccagcgggcatcggtaccggtcagaaaggtggtgatcagcacttctttcagctcgtcgcgggtcagtttacgtgagaagcagcgcagtgtcggcagaaccaggcgcagcatccgcagggaaaaaacacgtttcccgaaggcaaaacgcagaaaaggaacaaaactgtcacggcgggtcagcgtgccgtcaaaatcaaaaacggataacaccggtttttctgacggggtgggtgcgtgcataaagaggtatactccggttaaataggtgatcgtgcagagtttagcattttttccggcaaaaggagacatctgcccggcttgtcccgcgctcataagttatttactatcaggtattgattatcactatctgaattataccggtatacacggcgagaatatgatgattgcaatcagtgcttgtctggcaggcgaggccgtccgttacgacggcagccataaattatatgccccgctgaaagcgctgcagaacagcggaatggcggttccggtatgccctgaaatcctcggcggtctgccggtgccccgcgccccggcggaaatcaccggcggtgagggctgtgatgtctgggctggcaccgcccgggttaccggcagtgacggcgaagatgtcactgatgcctttaaacagggcgcactgcgggcactggagcatctgcaacagcggaatatcacgcatgtgatccttaaagctaacagtccgtcctgcggcagcggtctgatctacagcggcgcatttgacggcacgcttaaatccggcaacggtgtggcaacggcgctgtttgagacaaacgggatcacggtctggcatgaagaccatccggaactgcccgcgctgattgaacagctgttacagaacggaaaaagtgcatgataaccctgacacccgccagtgtgttaatccgtgtgccgggttgaagacccgtttcagaatctgatagggttaagaggtgcttaaccgcagaaaggagagcagagtgatatatccggttgatttacatgcccatacggttgccagtacccatgcttatagtaccgtccgtgaatattttaccgaagcggcggagaaaggaataaccctgtttgcgatcaccgaccacgggccggaaatggcggacgggccgcatccgtggcatttttccaatatgccggttttaccgcgcatgattaacggcgcggggctgctgtacggtattgaggccaatattaaaaatcaggccggagagacggactgcacggataaaatggcgcagcagctggatattattctcgccggttttcacgaaccggtgttgcagccgcagggacaggccgctaataccgaagccatgatcgccactatccgcagcggaaaagtgcagataatcacccatcccggaaacccgaaatatccgctggatattcaggcggtggtacaggcggcaaaagagtgcaatgtggcgctggagatgaataactcctcatttctgcattcgcgggcgggcagcgagaaaaactgctgtgcgattgccgaagcggtgcgtgactacggcggctggatctcgctgggttcggactcccactatgccggttatctggggaattttgagcgggtggtgaccatgctgcgggagattgagtttcctgaagcgcgcatcctgaatgtcaccccgcgccgggtactggattttctggaatcacatggacgaccgccaatccctgaatttgccggactctgaaaaaatgccccgcatcgcggggcattttactgtttacttagcgcgtaaatcataattccagttggttttttccagcgcctcaatactttccaccaccaggtcagtcagggcatccagcattttttcgcctttctcaatgctggcgtaagtcgggtcgccggtggcaccggttatcgaaacctcggtgatatcccacataatctgcacattatcgccgtggcggatgctgtcttccggcatctggcgcactgctttgctcaggtcgcacagatcaggacacaccgcagcggtaatggaagattctccctcaccgccatgccccagaccgttccattcacggaagaaattttccccgagacggccgccgagtacggaccaccaggccggcaggaacgcaaagaccacatctttatgacgcgctttgacattccgctgtgcgatatccagcgacggaatattgccgtcgtgaccattgaagacaaaaatgtgtttgatgccgtactgaatcaggctctcaaacatatcttccgcaatcgcaatcactgtttcaaagcgaatgttaatcgccatcggtgtgccgttatagtgggcggaagtgccgaacggcacacccggtaccacaatcgtgcgggataaacgctgtgccgcacggcgggcgacggcttccggcacaaacagatccggaccgagcggcagatgcgggccgtggctctcacagctgccgaaaatggtaatggcactgtcaatttcgcccttatcgaaccggtttttcagctcttcagtggtgaactcattcagataaacttttttcattatgatctccctgtggccggtgaggtggcttttgccgccagcagcggatgcaatatcagataaataataacggtaataactaatgccagcaggccggtcggccagtcagacagaatattgttcagtgccatcaccagaccggaagccatcccggccagcgcactgatcaccccggcgtaattgtatttcggctgactgttaatctgtgtgatgtcgtagcggcatttgcgggtgatgtagtaatccgccagcagcggcccggccagcggcggtgccataatgccgagatagttaataaaatcagcaaagaagatctggtaaaaaccgatagcgcccagcacagtaccgataatcccggtggtcaggatcaggacgtttttattcactttcaccccgacggaatccagcaccggtccggtatagagcgagttacagtagagttccgcgtcgttggtggtccacagtgacagtgtccaggtgatcaccccgatcagcgccagcaggaagcttttctcgatcatccaggtaatgtagttcggcatcccgaccgtcatggtgccgatataaccgaccacattgagcagcgggttggtgaaaataaaacaggctgccgatccccagaataccgcagaaatactcttattaaagcggaacagatccacgcccatcaccgccccggcaatccagctgccgaccaccatcgtgatcgcggtggagagcatcagcccttcattgcggttggaattctcaataaagaccgataacccgccgccttcctgcaacatggcatagccggtgatcacggcgataatcataataatcggcgataccggaatagcgataatttccagtcctttcatgccgtgcagtgaggtgtacgtaaacagcaggccggcgacgacacaggaaagaaagacttccagggtgatcggcactccgctgtagccgtgctctgccgggttaaagacgatgatcccgctgggattacccaggaacgtgccccagatatccccgaccatcccggttattgccgcaaaccagccgagggtcagcagccccatcgcaatcatcggcaggttcgcaccgaaacggccataggaaaaacggctgatcagcgccaggctcagcccggtgcgttgcgccataatgccgagcagcgaggtgagaataaacaacaatcccatcccgatggcgatagccagcagcgccatcggaaatgacattcccggcccgccgttggccccggccagggcgccgccgataaataacccggttgccacataaccgaaacctatccagaccagcacctgtttccaggtctcgcggcggtgtgtcatcggtatgggcgtaaacataaaatcgtggtcatgcgccggaggcgcggatgacgtttcgtgtttgctcatggtgtttcccctgtcttacgtggtgttggcagttgccgctaaaaagtgtttttaaaataaaaggccatgctcttgttatgatttattattagcctggtaaagtaattgtttgcaactaaattaatgaaaataaaaggaaaaggaaatttaatgtaacggacaggttgtcggtaaaagcggggcgggaaatcacataaacgggaaggagaacaaaaaatcgacgaaaaatgctgccatcagaaataatggcagcaggatataaaataaccggggtggtaattattccggcagcggcaccatacagacggcactgccgaagctgccgtgactgcactcaaccctgaatttgccgtaacggctgagaaacccgagcaggctgtcgccggagttaaaggtgacaataccggtcaccggctgaccgtcagtggacatatgcggcatcaggctgtccgccagtgcccgtttgattaatccggcctcggcggaggagccgatatagaattctgatttcagccagtttaccccggcggaaaccgaattcacgcccggagagcgggcggcggcgaacaccatcagcacccagccgttggaattctggctgtcggtcgcaaacggatgcgccaccatattatacgccggattgtgcagggctttgcgcagctcagggtcacgcagcactttcagtaactgggactgtaaggccggcgggaagtgcagggtggcaatggtatttccggccaggtcatcatcaataaactgataaagtccctggatccacagctcagactgcgcagtaccgcaggtgttgaggttatgatacacccgccaggtaccgttcctttcccgtacggcataaccggcatgtgaaaagctcagcccgtagtcactcagtgcctgaccctgacggaccagcagaacgacccggtcgccctgtttctccagccagtcattcagcactttggcctgtgcggtgcgctgtgcggcttcctgcggcgtgggcggggatttatccgcacagttctgactgccgctgtatgcaaggccggacgcagtgagcagggcagccgcaaaaacggatttcagcagtcgcatattatggcatcttctcctgatgggttaattcacgatcatcctgagttaccatatgggaaatgattttcccgtcctttttcagatacgcaccggggcctttttcggccggttccagtgtcagtttatcacccggattcaccggggttttctccagtttttcagtggcgaccagcagggccacatcttcatttttatcggtcttgccggtgatggtggtgactttttctttcttattattttccacagactccgcactcatctgagccggtaaaatgatcggcgataaaatcgcgccgcttatcatcacagagctgtagacactgcccgcactactgagtaccgcagtcgataaataaggattatccggcagtttacctgcattcgcaggcagtgtgaccagtgtggcggcacaaacgattgccggaaaaataaacttattcatactgtttcccttaaattaatgaacaaatgttctttttacccgttcagacaccaggaaatacgaaatccagatgatagcgtaaataaccaatcttatcagcggataataaagagtgaagtcaacattaacatccagcagattaaccagaacgatttcctgaatggcttccgaggcgatggcaaaaagaataaaggcaataaacagcttcggcagataacgggagagcctgaagaaataatacagcgttgtcagtatcagcagcatggtcagtatggtaaaagcaatattaatatacatgacctgcaatacgcggtcaggaatataccccgcattttgctgatataaatcataccactcactcagtgtgtaaccaccggcacccagtgacagaaaaagggtaattaacggcagccacagccagccgccgatccgtgacatccgtttttccgcgcactcatcacaatattccgcgtattgcggaatctctttttccccgcactgaatacagacccatttatgttccatacattattttccgttttcgtctttccggattctccggttatttgggttggtcgtttatccggctcatcagaatagcatcgacatagcgtccgtcgcggaatgcataatcgcgggcaatcccttcgcgctgaaaaccgaatttttcatacagcgccaggccgtccggattattggcaaacacctctaattcaatacggcggatacccagccagttatcacaataatcaatcattgcctgcattaatgcactgccgacgccctggctgcggtagcttttatttaccgtaataccaaaattcaccacatggcggcggcggggattactgttctgattaatacccagcagtccgaccaccacgccgtcaacaaccgccaccaggcgggtggctgactgatcaccctggctcatccggtgttcccagaacttccgcgaggtatatggcatctgtaaggtattggcataagacgtaaaatcctggtgcatatcgcacagcgccgccgcatcggaagggtcggctaagcggatggtaatctggcgcataaataatatcctttatgtaatactgttatattcccttattaatggcatcgaaatagtgtacccgtcaacggaatgaaaaagcctgaccgggaaggcgaaaatggcgtaaccgtgttttttcctgttattttctttttcacggatcaaactgtctgagaatgaaagatgacgataaaataagcggggtaacatactgacataagcaggaaagtgcattttctctgaaaaataaaaattcctgtaaaaaagtaggctaaccggcggcgggcgattacactgaatccttccggaaacaaaagggattgtcatggacgtccggtttcttaaatccgtattctgcaaatcaggtatcacccggatgacacattcagtacagacactggtttttctgcgccacggcgaaaaaccggataacgacagcggccagttaaccggcaaaggattaaaccgcgcactggcgctggcggatcttctgatcgcccgttacggaaaggcggatgccctgtatgccgccgcaccgaaacagagcaagctcggcaattcgctgcgttctcttcagaccatcaccccggtggctgtccgtctgtcactgccggtgcatctggaatttcacgccaaagaaaccaaagccctgcgtgatgcattgctggatagagcccatcacgggcacacggtctttgtggtctgggaacacgataatctgataaaagtggtgagggatattctgaaacagaccggcggggactattcggatatgccggcctggccgcgtgatgattttgacagcctgtggatactgaccattacccgcagtcagacagagaccaccgtgacgttttcacaggaaaggcaggggctggataatctggacagttatttcccgcagctccggtagataaaccggaaatcagcgggaatacagactcactcttcttttttcttacggctggcttctgctgcccgtttacggcgcatttctttcgggtcagcaatcagcgggcggtatatttccacgcggtcaccatcactgacaatatcggtcagttttgccggacggctgaaaataccgactttattctgcgttaaatccacatcatcccgtaacgctaaaataccggaggcaagaataacggcttccaccgtggcgccttcgtttattttcaccgggatcagaaactgtttatcaggcagggcataacagacttcgacagaaatatcagacacggtaaacctcttttgcccgtttggtaaatgccatcaccatattaccggccagctctttaaatatacggccgaaggccagctcaaccagcttattggtgaattcaaaatccagattcagctcaactttgcacgcctcaggactcagcggaataaacgaccagccgcccatcagtttacggaacgggccttccaccagctgcatacggatatgctgattgctggtcagctgattgcgggtcacaaaggttttactgataccggctttggatacatccacagacgcggtcatctcatcctgttcgtggctgataatacggcttcccacgcagcccggtaaaaattccggatacgcacggacatcattcaccaggttgtacatctgttccacactgaacggaaccagtgcggagcggctaatttgcggcataacacatcctgcggtcaaaaatcacgaaacggcggaaattatcgccgcctgttaaatcgtattatactgtgctccggcgcggagataaatgcacaatacggcacgcgctgatgacagaatgtatcttaatgacaacaaagatgtttgtcacaaaaagcacttgccaaatcccgctgacatgttaaaaacagcgtacagggacagaaaacccgcaaaggcgcttaaaatagcagcatttaccgtgcgacggataaataagcaatttatttcgggtgtgcataacgtataatagtggtcattatgacaaagaaaaaagttcacaaaccaggctctgccaccatcgcgctgaacaaacgcgcccgccacgactactttatcgaagaagagatagaggcgggtctggcgctgcagggctgggaagtcaaatcattacgcgcaggtaaagctaacctgggggacagctacgtcatcctccgagacggcgaagctttcctgtttggtgccaacttcacaccgctcagcgtggcctcatcccacgttgtctgcgacccgacccggacacgcaaactgctgctcaaccagcgtgaactggacagcctgtacggcaaaatcaaccgtgacgggcacaccgtggtcgcactgtcgctgtactggaaaaacgcctggtgcaaagtcaaaatcggcattgccaaaggtaagaaagaacacgacaaacgcgatgacatccgtgaacgtgagtggaaattagacaaagcaagaattatgaagcacgcagggcgttaagtactggtattccgtactgattttctgatatactgcgtttcacaacttggggctgattctggattcgacgggatttgcgaaacccaaggtgcatgccgtggggcggttggccacgataaaagccgcaaaaaaatagtcgcaaacgacgaaaactacgctttagcagcttaataacctgctctgagccctctctccctagcctccgctcttaggacggggatcaagagaggtcaaacccaaaagagatcgtgtggacttcctgcccggggagaaagcattaaaacgaatcgggctagtttgttagtggcgtgtctgtccgcagctggcaagcgaatgtaaagaccagactaagcatgtagtaccgaaggtgtagaaatttcggacgcgggttcaactcccgccagctccaccaaaattctccatcggtgattaccagagtcatccgatgtagtcgaaagcccgcatggcgtaagccctgcgggcttttttgtgtcctcaatttgtcctgcgaagcctgaagagaactaattaaatctgaattttttaggtatctcgttagttaactggaataccattccgtagattctattctgtttttcttggccattttgagggctttccttgtcaggctactacctaattaaattgatatttcatatcctgagaacaaataaatctagcgtaatagtcaagcattccttgcggtaccctccgataagctcatcctatccccatagggggacagtggaaagtacgatatccatagttttcacggcacccataccagtataattttactcaacaagtagctgggtggggtcatgtttacattctatactgaaattttatttttttcattaatgtaactaagttgttatgggaaaggcatgtcacttttattcaggtggccaacttagttaaaatactggatttatttttttgatataacttgaaaacaagtgaagtgaccccaaatcgattcataataacaatgcaatcgaggtctttatgagtctgcagaataagtttttcaagtttcatgacgctatactgttaggcataaaggacgtggcatatgctaatgcccgtcttaaggacgaaagtatcctcaaggagataaaagctcgctttaaggaagatggattttcagttattgatgattttatacaaggttcgatggcaaccgatacggggatccgtgagaagggtcaagattttgatatcgatcgcgcaatagttattgaagcgtcacttgcgccagaaaacccaatcacccccaaaaaagcggtcctggaagtacttgaagaccgtggatttaagaatgcaaaaatcaaaaaaccttgcgttacggctgattacaagactgaagatcttcatattgatattcctatataccgccgatatgaaaatggacaatacgaactcgcggtaggtaaagcacattctgatgaagaaaatcgtcaatggtctccttcagctccgcgtgaactgattgattgggtgactgcctacgatgatagtgctgtgtatgcatctaaaaaacacgatcagtatcgccgcatcgttcgatacctcaaacgatggagaaatttcacttttagtgaaaatgttcgtcgcaaaatttattcgattggcatcactgtgatggttaaagaatcattggtcgcttcaatcaatgatgaaggttttccagatgacctgtcagccttacgcgcaactattcgtcatattttgaatgatgggggttattttagcttaatagaggctgaaaaatacaaagttaaagtagatatccctgtaagtcacacaagggatatttttgataacagtagcatcacaaccggcactcaattccgtaatcaacttgccgctctgttaaaaactctcgacaaggttgcggatgaagatagcgaatctaagcagtgtgaattgcttagaaaggtttttggcgaagatttccctgagcatgcttcgacatctactgcatcggcagtgtctactgcatccgtagcggcaagtgctggtgccaatacagtctatgcttcctcaggagctgtagggacatcacaaggcgcatgaactattcagctatcacggattacttagccaaacgcggatacaagatatccgcgtaccctgctgaaactgaccagattgaatttttcagaattgaactggagataggggattttccggtcacgttagtccattaccctgtcaaagaaattaccggtttgcccatatttctccttgtaaacccttcagctttgcctagattggcacatacgacagtctatgaagagatcggctttgctactatatgtgtaaatgtccctgatgcggtttcagttaactacgagtgccctgaactggcgtttgaggagtcacttaaacgacatattacattacttacacgtgccttaacggaccgagattggaatacccaggaactgctgagagagtttgaagcgggatggggaagtatcattgagccggaaacgacaccatttctttgcttatcagatgagggggaggctgagtctctttctgtttttaagcctcgtaaaaacgccaaagctggacttaatacatattttttaggctatagagaaggttggaatcctgatgccctcttttcgcctttaagccagatcttgaaagagcgagaagaaactaaaggaaatggatttgtcataccacttaaagcaactatgcccgccccttggcagaaggaagaattggctcagtggtatttagaattactacagaatttgccacaggatttatttaccatgctgacaaaacgcttcggtcagcaacgagcccgcgaattttggcttatttttaatgcccaaaccccttctggaaaaacatggtttgggatccattttgcgttaaaaaatgcagttcagggtaaaaagcatcttccctttaaagcaagccacattgaggagtgggttctaaaagccctacctgttttaacattcaataaagagcgattgatgcctagaagtggggctaaccagtccttgctgtgcaagaaggtcatgctcgtaggctgcggatcagttggaggagaagttgcagataagctggctgcatcaggtgttggtcacattcatttgtgtgatcctgattcactatcgctcaacaatctttatcggcatatactgcctccagcatttgtatcatgcccaaaaacagtcgcgttatggttaaatctaaacagtaaatatccttggttagagattacaggcgacatgacaaagctacttgctctaaggaaggtgcgatttaatcagtcatgacgatccagagcctggatatcctccttacgcggcaaagtaagcaccccagtttggacaatatttaatctcccccatcaactcagggtaagcaaaatgtcactgctccactgatattacaatgattttcacgacatccccgccagttgtcccgcccgcaccaaattgcacattgcaaacagcattgaaagccggttgtggttcttcatcagtccccgtaatcgtgttttgctgaaaccaaactggcacttcagtatccggaaaggatgctcaacctttgccctaatacctgctttcacatattcatcatgcagcgcctgcttattcagccggggatgctgtctgagcttttttacggcatgaggacctttggcaataaaccactctttaacccgatgtgtcagagagtcccgtttttctgccccgcgatatccggcatcggcgaagacaattgctaccggctccgtaatcaggctatccgccgcattcaggtcatgcacatttgccgccgtggtcactactttttccgtcaagcctgtggccgcatcaacagcaatatgagctttcataccaaagtaccactgatttcccttgcgggtctgatgcatttcaggatcccgttgaccggctttattttttacggaacagggagcggaaataatggtcgcatcgataatgatgccctgacgtaacatcagtccggcctgcttcagtttctggttaatcagtgccagtatctgttctcctgcatgatgtttctccagaaaatggcggaaattcatgatggttgtgcgatctggcaccgtgtcacagatccccgcaaattgacggaacggcaggacatcatgcagggcgtcttcagccgctccgtcactgaggtcaaaccagagttgcaggcagtggatacggagcataagcaccagggggaaaggccgtcggccgcgacgggatgacggatagacgtgaagcagcttatcagcaatatcctgccacggcaccagaacattcatacggtcaagaaaacgggatttacgggaggaatagctggaaatggcaggcattgtaaacagctcatgataaagaaagctttatgttctcacatatgacgattaaatcgcaccttccctaagagatcgcaagactctttcttcattcgatcttatcattatcgcgatagggtcccccacacaagaacgcatgtttcatgattatctgattaaagaaaaaatcaaagttcctgtcatcaatacatgggttgaaggctatggagttggagggcatgctgttcttgatataccaggaacaccaggctgcttgcgatgtgcatacgttgattccgacaatttttctcgtgggctatcatctaatcttaactttcttgccacaaaccaagatttgacaagaaatcatgcaggatgtggagacgcctttcttccttactcctatacatcatcaactctgacagcacttattacagtggacctggccgtaaaatatctcagtcatagagtaaacgtctcatcgagagttagttggaagggtagctcagaagatgcgattgagtatggttttgtactgagcgaaaggtatcacgcgttcaatcgctcattggaaatattacctttgtacaatcctgaatgtgatatatgcaatggataattcagaacatctcaaaataaatacagaaaattttagcatcaatattttaaaaaatgttaatgatatttggtttgaatatcgacaaataaatacaaatatgccagaagcttttggtgtactgattggcagtaaagaccttgtaacagaacattataaaatcgttaatgtaacagtcccacaacagggggatcgctgctcaagaatgagttttactctgatggatcccgcacaccaacgtatagttgatacccattatcgcgattccgggggtgaattagtttatcgcggcacatggcacacgcatcccgaagggattcctcgtgcttcaaatgttgatatcagagactggaggaaatgtaaagaaagaaatcaagacaagcaacttttctttataatcattggtacagagaaaaaggctctttattattttgtaggtgaaaatcttctacggcatgagttttgatggatgattatgaataaaacaattattttatatatactgaaattaattttcagacccaaggatatactcactcgtattggtttagggctgtttagtggagggataacagcttcagccggtggatggagcatgaacttggttttttcagagcaattgcttaaaaattatatcaatatttttgatggcatttctattagctaccaaaaatgctctgaagtgtttctatacattgggatctttgcgtccattttaggactgttagtgctgatgtattgcatcttcttggctgttcgtgatgtccaaaaacgtgatattgcttttattcgtgcatatgggtttgaaaatattgacccacatgcagcagaaaaaatgctttcgtccagagaaaaagtcaaaactctccccgtagatttaaaagcatttgattctaggactaaaagcaaagtaatcgaagagtctacatttatcagaaggatgataaaggacagaatacaacaccatgaagccactgtggcctatgttgcagctctagggagtattccttatttgtatatgattggtagctcaatgcgtgacggtcacttgcctttaagactatccgattttgatcgtaataaaaattgttttcatcttcttgatgcccccccaaccggtgccaagttaattaggaaatttagtggggagataacagaaaatagttccgttgttagtgtgaatgttaacaatcagatagggttagctatttcatttacgatggatatacagccatcggacctgcccgtagacctgagcgatcatacgctacatatccagcttgatacaggattcagatttgacaatcttccttctgaggaagagcaagaaaatatcactaaagaagtaagttttataatatcagaattgaataaaaaagctgatgaagtacatctatttatttcagctcaggcatcatttgttgttcgccttggctctctttatcaagaggggttacatggtgttatctatatttggcattggaattcaatcaaaaacaaatacgaatggaacttgaaaatttcaggtaaggaagtcagttaatattttataataaactgtttttcttatgataatgctgccgttaaattattcagtaaatgtgttatcgtcctgaaaatgctgttcgttaagtaggttatctgacacaaaattcatacctcataactaaatgagttgtggttttttgagatacttacaatttaacattgtactgatttattaaatattaatgcggttatgttgttaatgcaaacaggaaatttgtttttttaattactctgtctgtttatgatgttaatagttaacattctgaatgataagatcattttttgtatggaaaataaaaagcatcagtttaaaatctgtgtcagccatcatagctgatgcttcccggaatgattacaatggttttatttccttctgaacaggactccccatgacaccaaataaccgaaaattacctgtttttaaatatcatcccgatccgcttggaaccggtgctttttcagacgataagatagttaagtgtgattgctgtcagcaaactactgatatttactatgaaagtccgttttattctgtcgctgatattgatgcattatgcccgtggtgtattgcggatggttccgccagccggaaatttgagggtgaattccaggatagcgccagcgtggaaggaattgactgtgaatatgatgacgatggtgaattttcacacaccactaacccgtatccggatgaaatgctggatgaactggttaaacgcacgcccggttaccggggatggcagcaggaagtgtggctggcacattgcaatgagccctgtgaatttatcgggtatgtttgctgggatgatataaaagactggctggatgaatttgtttctctggaagatgatattcaggaatatggtttttttgttgaagaattatccggcctgttacataaggacagtgatgctcagggatatttattccgctgtctgcattgtaaaaaattgcgtctgcattttgattttagttaaaggctgcagagcggagcaattcagctccgctttcaattaaaaacgccgcagactaaaacgtcctgcctgtattacccttactgataaaactccacatcctgcaatgtattcaattcctgctcgatacgttcgcggctgcggagtaatacactgataatctggttgtttttttcatcattactgcggaatgtcgggacggagacactgatggcggcgataattttattacgctgacgtaatgaaacggcatagcagcgggtttcttcgtttatttcccggttgtcagtggcgtaatgatttattttgacctcttccagctgctgacgtaattccgcgatggtagtgatactgtattttgtcagcggggtaaagccgtcaggatataagcggagaatatcatcatcgctgtaatggcatatcatcgctttacctaatgcggaataaaccgccggtaagcgggtgccgatattggagactaactgaactttctgggcagactgcactttatcgatatacaacacatccgggccgtctaatatgcccatctggcacacttcattgcactcgttgacaatattattcatctcgcggtgcaccattttcagccagtacgatttttcaaagaatgaacgggaaagaatcgagcaggcgatacccagaaaataaagctgggtgttttcgtcataattaatataacggcgttctgcgagggttttcagaatcgggtagagtgtgccttttaatatgccggtttttccggccagctgcgtgagggaaatcccggtgttttctgccgccagaacactgagtacctctaacacccgtattgtcggcatatgctccgttgacatcaattcacctccctgacagtttatgccgttattctaggtataaagccccgctaagtaaatcatgtccgggtgtccgtttgtgacattgcccgccggtatcacggcaatccgctttattgttcccgtaatgtgctgctcctcacagataaataataaataaccgcaatccggatcgggtttttccgcagatatagttttcaaccgcaattaaaacagcctgttagcctgttttttcagcgaatgtacaaaatttgactcactcagagtttcatgattacttacctgtgtttttatttattaacgaggtttgtatatatgaacaatatgggtatggaaagccgttacatcacgccggccgtaacaatttttgatgacaaaggccggattgataccgaacaaaaccagcgggtgtatgactctctgaaggggcatgtctccggatttgtggttatgggcagtaccggcgagtttttttcactggatatggaaagctcaaaaacactgatcaggttatgcggcagttatgacaaagggggaatgaaagtgtatgccgggaccagccgcccggatgtgaatgagtcagccgcgctggcgaactatgctcatgagcagggggtggacggggtaatgattatcagcccgtactatttcccgctggatgatgagggtgtttaccggttttacagcacggtcgcggaaaaaacgtcagccaatatttttatctataacttcccggaacgtaccggttactcggtgtcaccgaaggtgtgtctgcgtctggcggatcgctatccgaatattatcgggctgaaagatacgatccccgatacattacatacgtcgcagattattcagacggtaaaaaaagagatcccgcattttgaggtttatgccggttatgacaataacttcgcccatgttgtgctggcggggggaaatggctgtatcggcgggttatccaatattgtgcctgagttcttcgcttcctggatggcggcatttgcacaaggtgatatggctgccgtagcggcacatcagcgcaaagtggatcagctgatggccgtttacggcgtgcattcaccgtttatcccgacctttaaaaaagcattacagatgcggggcattattcagtcagactactgcacagcgccattcagcagcctgaatgcggagcagactgaacagctgatgcagatactggcggatgctgaaacagcacgctgatttttcctgattataacgacagaacatcttaccgacagggaatattatcatggcgactatcacagcttatgacaatcctgctttaaattccgcgattcagaaatcgtggaagcgtttagtacccctgatgtttattttgtattttgtggcatttattgaccgtgtgaatgtgggctttgcgaaagatgccatgcaactggatatcgggctgtccgattccgcctttgcactgggggcggggattttcttcgccgcttatgcactgttcgggatcccggcaaacctgatcctcaataaaatcggcgcacaaaagtggctgagtattacaacggttatctggggtgtgttatccgcaatgaccggtttcgtgaccaacgagacgcaatttattgtgctgcgttttctgctgggactgggtgaggcgggtttttatccgggaattttattactggcctccatctatttcccgaataaagtccgcggctcggtgattggtatttttgttctcggcgtaccgctggcactgacactcggttcgccgttatccggcgcactgctggaattacacggctggatggggcgtccgggctggttctggatgtttgtgattgaaggtttaccggcggttgttatcggggtcttcgcctttttctggctggatgacagcccggagaaagcccgcttcctgacagcggaagagaagaaagcgctgacagagcagttagccagtgagaatgcgaaaacagaaaccacatctgtgttgtctgcactgaaaaatatcaaggtctggcacctggcacttatctacggcaccatccagatctcggtctacgggctgatgtttttcctgccgtcacaggtggcttccctgatgggacagagcctcgggtttaaagcgtctctggtggcagctattccgtgggcatgctcggcatttggtgtgtattacatcccgcgtctggctgataaaaatccatcccgccgtgtggctatctccgtgatgtgtatgctggcagcggcagttggtctggcattatccgcctttgccagcccggtctttgcgatcgccgcgctgtgtctcagtgccgttggcttcctgtcggtacagccggtgttctggacattcccgccgcagttactgagcggcccggcgctggctgccgggatcgggttctgtaccaccatgggggcattctgttctttccttgcaccgatcatccgtgtggaaatggataaactgatgaacagcaatacggcggggattatcacactcgcggtgatcactgtcggttgtgcactcctgattgccttactgaaaaagaacacacaaaaataatcctgattcattgccgtcattttggcggcaataaccggaaggtgagttatgcaaaagatattacgtattgatgaaactgataatttaatcgtggcactgaaggatttgcatgccggtgaggtgtatcagtggggtgatgaatcaatcactctggtcacggatgtgaaagccaaacacaagtttgccctggaagcagtgccggaaggcggtattgtctccatgtacggcaccgctgtcgggaaagcaacaaaaccgattgcccgcggggaagtgattaccgtggataatatccgccattatgccgccccggtatcactggaggagagcggaggctatgaatggcagatcccggatgtgtcggcctggaaagaccggacatttaaaggttatgtccgtgatgatggccgggtcggaacagctaactactggctgatttttccgctggtgttctgtgaaaaccgcaatgttaccaaactgacggatgcgctgaatgaggcgctgggctacaccaataacagtctgaaaagtttcgccctcgatctgaccgccggtgagcaggtgcaggccacaaaacctaagctgttcccgcatattgagggtgtgcgctgtattactgtgaccagcggctgcggcggtgccacctctgacagtaaaaccatgtgtgatgtactggctgcgtatgcggatcacccgaatgtgatcggcattactgtgttcagcctgggatgtgaaaaagcacagcgcaagatgttcaaagagtcgctggcggcacgtaatccggcatttgataaaccggcgctctatttccggcagcaggaatggaacagcgaagaagagatgatgcagacggcgctgaaacaaacctatgagtgcatgaaagcggtgaaacctcagagccgcacagatgtaccgctgtcatatcttaagctcggcgtgaagtgcggggcgtctgacgggttctcgggcatttccggcaatccggcgatgggactggtgtcggactggctggtgacactcggcggtgcttccggcctggcggaattcccggagctgtgcggtgcggaaggggatatggtaaaacgctgcatccgctttgaggataaaaagaaattcctcgatctgatgggacagtatgagaaaaccgcgaacttctttaataccactatcgcggataacccgagtcccggaaatattgctgatggattaattaccgatgcgattaaatcaaccggtgcggcgaaaaaaggcggaaaatcgccgatcagtgcggtgtgtgactatgcggaaccgatgccggacagcggactgtctctggtctgcacaccgggaaatgatgtggatgcggtgaccggattggtggctgcgggctgtaacgttgttattttttccaccgggctgggaacaccgacaggaaaccctatcgtgccggtcgtcaagatttccaccaacagcgctatcgctcagcgtttgtcagatatgatcgattacgactgtgggccggtaatagaaggtgtgccattgccggaaatcagcaaagggctgtttgagcgcgtgattgaaacggcaggcggggaatataaggtgaaagcagaccgtctggagcagttcgattttctgctgtggaaacggtcactggatttataaaaagtgtactgtcacacagataaataaaaaacggggaatattccccgttttttattactgcgctttgttatcagatatcgttatcagacataaaacttcatggattttttgccgaggcagaagctgataaacaggccgagagcgcagaggaacagaatatagtaggcgataaacatcgggttaacgtgttcagcgataaccggtacggtgaaggtggtcagtccggcgaacagggcgttaccgatgttataagagaacccgatgccgcttaagcggatattggccgggaacagtttgataataataatcggcacacaggcaaccagacccaggaacagggcggccagggaatataagaagccgatcgtggtgtggtcaccgctgcccagggaattaaagaaggcatagctggtggcagcgagcaggatgctgtatatcacaacggttttgcggatgccgagtttgtcggacacaatccccgcaataatgctgccgaccatgttcatgacggtggcgaggatagcgattttactgacaaattccgggtcgattttaaaaatatcggatttcatcaggtttggtgccaggacgaccagaaccacaccggtggtcagcagccaggtagcaagaatagagatcatcgtggcaggtttgtagctcttcaatacctctttgattggcatatcaatcagttctttgcgctttttcatctccaggaataccggcgtttcacgcagatagcggcgtaaatatacggcaatcagacctaaaaccccgccgcagataaacggataacgccatgcaaaacttaagatctggtcattgctgaaattggtgtaaatcaggtaagccgcgaaatggccgataaccacgccgaatgtcaggccgctggcaatcatactgttcgccagaccgatacggttctgcgggacatgctcggtgacaaagacgtgtgcactcggcacttctccgcctaatgcgatgccctgtaacagacgcataatcagcagcaagaccggcgcggcatagccaatctgctcataggtcggcagcaggccgatcagcagggttgggatcgccatcaggaacagggagagcataaacatttttttgcggccaatcaggtcgccgaaatgtgccattatcacgccgctgagcgggcggacaaaataagcgaccgcataggtcagataggtcatgatgctcgaaagcagcggtgagtcactcgggaagaagagtgtctgcaaaaagggtgcgaaggtgaggaatacgataaagtcgtaaaattccagcgcaccacccaaagatgcaagagtcagcgtttttccgtcctgtagctttaagcgattagacatgccattaaccttacttattaaacatgcgtgaaaataaaataatcgtgaatactagcacgatactatcagtcagtgagatatttctgaaaagttaattatactaatgatttatatccatttttatagtgtggttaccctggtaaataatatatctccggctaattggcggaaatataaggaaagtaatgtttgagtatcatgattattaccaggatggaacagataaaataccggagagtgataaatcatagtgatgaataattattcgttataaatccagtgaatggattgtgtgcggcgggctggccggtgacaccagtcagtaacaccaaaccggaacagataaatgaacaaaacccgctgatccgtaatatatcagcgggttttttgttgctaaccacacgttgtttcagcgtgacaacaggtaatcagtcagtgacagtctcactggcgatttcacttgctgtttcgtcaccgccgtcaggcttgtaattggtgttcgtgatttggctcagtgtaccggctgagtcaaagaccagtgtcagtgtttcctgtttcaccggctcatggcccggttcacggcggaagacataataccaggtctgtgttccgaacgggtcacgtaacatcggggtaccgagtgtataggcgacttgctgttgggtcattcctttctggatcttcgccacgtctgccggtgtcaggtagttaccctggttgatatccgggcggtaaacgacacgctccagagtggaacaaccggcagttaacagcaacaaagatgtcgttgcggcaatcagcaatttacaacgcatggtgatttcattcctttaggattctttgtgacgatgataatcgacaataatcaaattgaaaacctttacatttttctatgaccgcaggatcgcataaaagttagatgaaatcagcttgtttgtcatgctgccagcaattcttttgcgctggcaagggtatttttggtgacggcagcgccggcaagtaaccgggccagttcctgtacccgtgcttttttatccagcaactgcatggcggtttcggtttccgtgccgttggtgtgcttgctgacaaagtagtgctgatgcccgcaacccgcaacctgtggtaagtgagtcacacacatgacctgtgtggattcgcccagctcacgcagcagtttcccgacgatagcggctgtcgggccgctgatccccacatccacttcatcgaaaatcagtgccggagtgtccattttcttcgcggtgatcacctgaattgccagtgcaatacgggataactccccgccggatgccactttcgccagtgcctgatgaggctgtcccgggttggtggtgacattaaattcaactctgctcgcgccgtccatactcagttgttccggggtaaaaattacatcagcggtaaagcggccgtgcggcatcgataaatggtgcatgctctgtgtgataagctcactcagttcagcggcgtagtgctctctgaccatatgtaactgctgtgcaatcgtcagggcctgctgataatactgttccgcttcgcggctcagttcttcgctgtgctgttcactctcctgctgcatctgctgctcttcctgcaactgtgcatacagaacatataactcttccggcgtggtgtgatgtttgcggctcaggctgatgtaacgggagattcgctgttcgagttcatacagccggttcggatccagatccacacggttactgtagtgacgcagttcattgctgacttcatccacctgaatggcggcttcttccagcatggtcagtaacggggacaggctttcatccagtgagatcagctcgctgagttcatgacgggcatgattgagcatgctgatgatgttgttttcatcattttcactgagaatgtttaaggtgccctgactcaggctcagaaactgaccggcattcgccaggcgtttatattccgcatcaatatccggaaattccccttcacggggttcaaattcaccgagttctttcagatgataatcaaccagttgccggcgggcttcccgctccagtgcctgctgctgatagagcgccagtgcctgacaggcgttgtgccattgttgccaggcttttttcatttcaccgagtagtaagccctggttggcataggtatccagcaggattttctggtggctgctttccagcaggtgctggtgggcatgctgtccgtggatttggatcagcagtgtgcccagctcacgcagttgtgacagcggtacggctgtgccgttgataaaaccacgggaacgcccgtcactgttgatagtgcggcgcagcaggcattcctgattatcatccaactgatgttcctccagccagagacgggcggccggggtatctttcagggagaagcgggcgcagatatcagcgcggttagcgccggggcgcaccatattggcatccgcgcggttaccgagacacaatcccagtgcatcaatggcaatggatttaccagcaccggtttcacctgtgatggcggacataccggcgcggaagtcgatttctaactcgcggacaatggcaaactgactgatggtgagctgggttaacatgccgcctctcctgtggatatatacacacctgtttttacatacagtataatcaggatttgtatccggtaaagaggcggaatgaaaaaaatcagaacatttttttggaccagccgagttttgtgcttaacgtattgaaatagttatagtcaatcgggtgtatgagatcgagcgttttgctgctgcgtttgatcctgaccacatccccttcctgtatcggcagcgctatctgactgtcacagctgacttcatagtcaatattggtctgcggaaatttcagggtaatggtgctgtggctgctgatcaccagcggccgcgaggagagagtgtgcgggaacatcggcaccagggcgatagcatcaagattgggtgtcaggatcggtccgcccgcagaaagagaataggcggtggagccggtcggggtggtgatgatcaggccgtcagagcgctgggaaaaggcaaagcgctcgtcaatatagacctcaaaatcaatcatgtgggcgacttttccggggtggagtaccacttcattgagcgcggtgctgcggcgcagtttgccgttggggctgagtaccccggcatcaagcagaaaccgtttttcgacgtggtattccccggtcagcacgcggtcgagctgctggagtgcattgtccggcgcaagatcagtcagaaaaccgaggttcccccggttcacgccgatcacatccgcgccatagcgggagagtacacgggcggcaccgagcatattgccgtccccgccgatcacaatcaccaggtcggcctgctgcccgatatccggcagcgtgccggtgacagcatcggtcaggcgcatttcagcggcaacatcactttcgacaatcacacgcagaccttttttcagcagccagtgatacagcagttcgtgtgttgccagcgcttcaggatggcgcggatggccgacaattccgatacagcggaacgatttgttttttgcggtattgtccgtcagcatgtgcgttttagcctcacttaatcgccattcccttgaatctctgagtttgatccccataataaacaagaatcaggattattgcgaaatacgcggagattttatgagtagtcacgaacaaaaaacgcacgaagaacctgttgcagatgcagcggagaccctgaacacggcagcagagcagccggaaacggagcaggcggatgccgccgcagcggcacaggcccgtattgcggagctggagcatgagctggaagagtcccgtaaaacggaacgcgaagcgatgctgcgcgccaaagcggagattgaaaacaaccgccgccgtatggaacaggacgttgaaaaagcccataagtttgcattagaacgtttttctaatgaattattacctgtgattgataacctggagcgcgcactgagtgcggtgaatccggaagatgaagcacagaaaagtatgctggaagggctggagctgacactgaaatccttcctggatgccgtgaaaaaattcggtatcgaagtggtcgaagagacaaaagtgccgttcaatccggatgtgcatcaggccattagtatggtggatgctgcggatcacgagtccaaccatgtggtgacagtgatgcagaaaggctacaccttaaacggccgcctgctgcgtccggcgatggtgatggtctctaaataaggaacgtttcacacgcaacggaatgccgccgcaaaggcggcatcaggccgttgacaaacccgcagggggtggcggcgaccgaaagaggttgtaaaaataaaccaggaaaatcaatttattgattttcggctgataatacaaagcaggaaaaaccacgttttatcctgctttgtctgcaatctcatgccgccgcaagggcggcatttttgtctctgtattatgcgccgggctgaagctctgccgggatcaccggctgccagtcgatgggggcctgaccgcgctctgtcagtatcgcattggtttttgagaagtgaccgcagcccagaaaaccacggtgtgcggacaacggtgacgggtgcggtgctttcagtatcacatgcctttgctgatcaatgtactggcctttccgctgggcatgtgcgccccagagcaggaaaatcacaccttcacaatgggcgttgacagccgcaatcacattatcggtaaacgtttcccagcccagtctggcgtgtgagtgtgcctggccgcgttcaaccgtcagcacagtattaagcagtaacacgccctgttgtgcccaactgacgaggcagccgtgattcggccgggtaaattccgggatatccgcttccagttccttatacatatttacgagcgacggcggcggctgaatgcccggcagcacagagaaagagagaccgtgtgcctggttcggcccgtggtacggatcctgtcccagaatcacgacccgcacatcagacagctccgtataacggaatgcgttgaaaacatctttctgtggtgggtaaatggtcttaccaatttctcgttcatgagcgacaacacggagtgtttcaatgaaatagggctgggttttctcatggccgatgacatcatgccaggtcagtgatgcagacatcgtgtcgttatccttcatttattacaagagttgcattcagcttacctgacttatccgttgttaggaaataagaagggatttttttgcgggtccggttttgataaccacaacggcagggcgaaaatggctgattttttacaaaaaaacctgaaaatcgcaaaaatgaaattttgatttaaaacaggcttttatcatggcgactaaaaattgatatgatttttattgatatatgtcaaagaatcacccctgtattcttggtatataagatgcagagacattggttagaccaatattccaagttaaatgacaatcaataaattgataacgaatcacccggaggtcatcatggttactggtattcaaattactaaatccgaaaacgctgcactggttaactctttctggctgctggatgacagcaaagacgaagtacgctgcatctgtgcaaaagaacaatatgcagacggtgatgttgtttcccgtgccgcattaggtcctttcgagtaccgcgaagtgaatttacaggttcagcctaccgtccgtgttgagggtggtcagcacctgaacgtgaacgttctgcgtcgtgaaactctggaagatgcagttaaccatccggaaaaatacccgcagttaactatccgtgtttccggttatgcagtgcgtttcaactcactgactcctgaacagcagcgcgacgttattgcccgtacttttactgccagcctgtaatcgttccggcaacagtccttgttccgaaaaccacgctccggcgtggtttttttatgtctgccggataaggatgtcggtaactcactgataaaaaatgatattgttacggtgtgatgaatagcgttaagtgaagccttctgtatccggggaggtatacttatgttgattgaacactatttttcgcagttactgtctttctcatccacgccgcattgtcagtcacttttgcagcggcagtatttaaccgcaacggatttattgcagccgccacccggcgggatccggcaggatggttttcctgatgatattaccctggcccggctgtgttcagacagctatcagcccggcagccgcgatataggtggtgtcagccgttcggatgcgcagactctggcttcgctttcgctgacagaagagcagttaagcagcccgtccggcctgcagagtatgatttatcattaccgcgatacctgtattctggcgtttgcgggcagtaatgatatgtcagatatgatgaccaatatccgccaggggcacggattaccggcccggcagtatcaggaggcggtgtcactggcagcacatctgttgtcgcaatccgtttgtccgtggctgtttgtcgggcattctctcggcggcgggctggcatcattctgtgctgtggtgctgcagcagccggcggtgatattcaatgcggcggggctggcggaaaatacgctggcggaagagggcgtttctctggtgacggcgcgtgcgcgcggggcagagcttatccgtcattatgtgctggagcatgactggctcacgcatatccaggacgggctggatcttccgaaagcactggggcagcggatagcgctggagtattatccgccgcagcatgcgcattccgttttgcagaaactggttctcggcgtgaaggcacataccctgtcgcaggtggttaccgcgatggaacagatggatgaaatccgggagtaagcataaaaaaacggactgtgacagtccgttttcttttatcagagagaaggagttccgtttattcctgtggctcagcggccgcaggagtttgtcccgcgtgatctgcgcctggcttgcgtcgttttccgatatttttactgacgcgatgacggattttggtttttttcttcttctcagtttcagcgattttctgctctttgcgcttggcgagcacttttttcgacggcttgtgcgtcgctttctccgatggcgcacgggttttcggccgtagctcatcaatcacgcgcattttaaccggctcttcaatataacggatgattttgccgagcagcggctggtcgtgagattccaccagtgaaacagccacccctttgcgtccggcacgggcggtgcgcccgatacggtgcaggtagacatccgcggtgcgcggcaggtcaaagttaaatacgtggctgatatcttcgatgtcgatcccgcgggaggccacatcggtggcgataagcacagtagcacggccgtcagtcatacggctgatggcttcgttgcgtttcgcctgaaccatttcgccttcaagatagcaggagacaatatcctgtgtgcgcagccagtcagacagttcacgcacgcgctcacgtttgcggacaaacaccaccgttttggtgacatccggttgtttcagcaaatgtgcgagcagggctttcttgtgctccaggtcatcggcacgcaggtagaactgctggatttttttgcgctcacggcgtgacgggtcagcttcgatctcaaccggctcgttcaggatccgtttggcgaaatcgcggatagcctgaccttcgagggtggcggagaacagcatagtctgtgtgcgccagcgggtttcaccggcgatggtttcgatatcgttggcaaagcccatgtccagcatgcggtcagcttcgtcgaggatcaggatctcaaccgcgcggcagtcaaagttctcttcttttatatactgcagcagacgcccggtggtcgcgacaacaatatcctggttctcactgaacacttcggcgtggttcatataagctacgccgccggtgatggtggcgacatcgtgatgggtgaactgacagaattctctggcctgatccgccacttgcatagccagttcgcgggtcggggtcagaataagcacgcgtggcggcccggattttttacgcgggaagtcagacaggtgctgaatggccggcagcagataagcggcagttttgccggtgccggtcggggctgaacccagaatatcacgattatccagcgcagccggaatagtggcttcctggatggcggtcgggcgctcatagcccttggcatccagtgcgcggatcagttcatcgttcagttcaagttcagaaaaagtagttgcagtcattatatacctctgtttggaccgctgattataaacggcttggacaggatcttcatcaaaaatagttgtcagcgtgcgggactttcttctgcgggcagaagtccgtatcctgtcgccgggttttctttattttaacagacaaacagttcagtgatgatgacaaacgaaaaacaacctccgcgccgccgtggttttgcctgcaaacaattttttgtggcccacgaccgttgtgccatgaaagtcggtaccgacggggtgctgctcggtggctgggcaccgtgtgaaaatgcccgccgtattctggatatcggtaccggcagcgggctggtggcgctgatgctggcgcagcggtcattgccggatacacggattgatgcggtggatattgatgctgacgctgcagcgcaggccgcagagaatttcctcgcgtcaccgtggagcgaccggatgcaggtgtttcatcaggatatcggtgagtttaccgctgcctgtccggaatcccgttatgcgcttattgtcagtaatccgccgtattttgccccggcggtcgcctgccgtgacagtgcccgggaaactgcccgttacaccacatcactggaacatcctcagctgctgcggcatgcggcacagcttatcacgccggacggtctgttctgtgtggtgctgccgtacaccaccggacagagttttattgccgccgccggtgagcagaactggtttctgcacacacagattgccgtgtcagataaaccggataccccttttcaccggacattaatcgccttatcgcgccgtccggtcagtgcgctgcacaaaacgatgagtattaaaacggaagagggccgttacagcgctgatttcaaatcatttatcaccggtttttatctgaaatactgaactgcgtcattgtagcggttacggcggtgcttttttcagtcaaaagcggattttacaggatatttacactgtcctgcggcaattttccgtgattatcagagggattaccgctgaaaacgtggtaatctgtaacgttaattgccggaaaaacaggctgcggataaatacgcaggatttatccggaaaatatgtagtgaggatcacaaaaaggatccttttttgtaatttttttaaaagaaaaatgaacttcgctattttagctgactcaaagtatcgcttgctcatgatgaagtgaagcgaaacaggaaagagaatggtgaagctgagcttcgggagataacactgcgaatgagcgagcagttaacggatcaaatgctggttgatcgggtacagaaaggggatcagaaagcctttaatatgctggtggtacgttatcagcacaaggtggcgagtctggtatcccgttatgttccgcagagtgatgttccggatgtggcgcaggagtcctttattaaggcgtaccgcgcagtcgggtcatttcgcggtgacagtgcattttatacctggctgtaccgtattgcggtcaatacagcaaagaattacctggttgctcaggggcgccgcccgccgtccagtgatgtggatgccggagatgctgagaattttgaatcctcaggggcgttaaaagaaatttcgaaccctgagaacttaatgttgtctgaagaattaagagcggtggttttccgcacgatcgattccttacctgaggatttgaaaacggcgattacattgcgtgagctcgatggtctgagctatgaagaaatagctgagattatggattgcccggtcggcacggttcgttcccgtatcttccgcgcacgcgaagccatcgataataaagttcagccactgatacaaaatcagtgagcacttaaatcacactgaagggaacgtaggcatgcaaaaagagacactttccgcactgatggacggagaaactcttgacagtgaagtggttaccgcactgacacaggatgcagatctgcaggcagaatgggctggttatcaccttatccgtgataccatgcgcggcgacctgccggatgttatgcattttgatattgcgtcacgggtagctgaagcactggcgcaggagccggtttatatcgcacctcaggcgatccctgagtctcagcctgaaccgaaaacatggcgtgattacggatttgtggcaaaactgcgcccgtgggccagtcagttaacacaaatcggtatggcagcctgtgtatcactggccgtgattatcggtgttcagcactataataccgacggcacagagagcgtggttaacggtgatgcatccgcattcaataccgttccgtttatgggcagtgcgtcacctgtcagcctcgatctgaaaaacggcgccggtcttgccccgcaaacccgttttgatcaggagcgcggtgcgcgtctgaatgcgattttccagcagtatgaactggatcgccgtgtacacacggatggtcagcctgaagttaaacagacagccaccccggaacagggtcgcgtgtcttcacaaccacagcagtagtaatgaaacgaatctggttatccgttgcttttctgacgggcagcctgttactcgcagcaccggcctcagcacaacaaagtgctgaggcgttgctgcagaatatgggtaacgcttcccgcacactcagttatgaactctcttttatcaccatctccccgaaaggtatcacgccggtccgttaccgctatgcggttatggatggtcagcctgtcgcccagattatgcagatggacagctcccgccgggaaattgtccagcgtggtcaggagatcagctactatgagccggggctggattcattcagcctgagcggtaatcacattgttgattatctgccgtcgattatttttgcggacttcaatgcgctgaaagcctattacaattttattgatgtcggacggatccatatcggcgatcatccgggacgggtcgtgcgcatcacctcaaaagataactcacgttacaattatattgtggtcgcagatgaagaaaccggcctgccgttacaggtggacctgctggatcagaataatgtctcactcgaacagttccgcgtggtttctgcttccgtgaataacagcagtgtgacagaagcactgaaagcggtacagtctgtcactatgccaccggtactggctattccgcagccggaaaagatcaaatttgactgggatgtgatgcgtctgccgaacgggtttaaagaaatgacccgcaaccgccgccaggtgggtgagcaggaatgggttgagaccgtgatgttcagtgacggcctgttctcattttccgtgaatgtcgccaaagcggtgaagacaccagaaaatcaacagacaatgcgccagggttcgcgtacgctgtacaccatacgtaaaggtgataatgagatcactgtctttggcgaactgcccccggcgacagcccggcagatagctgacggtgtgacattcagcggaggttaatatggtaaaagagtgggcaaccgtggtgcgctggcaggacgggcgtgcggtgttgcgttacgggtcatctgccggatgcggcagttgcaaagcccgggcggcatgcggctcttatctgctgaataaactggggccggaagcggagcatcagcttgaaattccggtcagtgaaccgctggtgaccggccagaaagtggaagtcgggatcccggaaggcagcctgctgcgctcggcaatgctggtgtatctcacgccgctgctgggtttatttgccggtgcggggctggtgcaggcactgacggaaagtcagtctgcggttctcgcgggtggtctgctgggcggcgcagcagggttcctgctggcgcgtaaaattgcccgccactggagcggctcagcggattatgagccggtcatcctgcaaataggcctgccgccgtcagagctcagcattgatatatgtgagtcctgatttatccgggctctcctgttgtgaagtatgccggtcatgatttgaccggcattttttttaccgcgggaatgtcagtgattcctatatttttcttatgctgctcaggtagcatgaggaacttccgtgtaagaaaatatcctgattagtgagggcagtaatgctggtacagacagtaaaggattaccgtttttcaggcagacaaaaaatgtttcaggggatcagtgccgggagctccgcctctccccgggggttggtttttcagttaactgacctgatgactcagctttccgtaaatgtgctggatatcggttttggtaccggaatgtctggcacggactggcacaggatatcccgcaggaattatttgccaaatatgatgttatttgtctgccggatgtgattgagcatctggacagagataccgccattgagctggtcagatatatcctgaccaacatgaatgataatgcccgcttttttatcagtacgccattgtggttttatcctcaggacacaatacaggaaggtgatcttgaaaagcaccttatcggtgtgccggtatcctcaatgatggcaatgctgccgcaaatgtattcagtgaataatccccttataggcgggtttatttacggcaaagtcagtcttgattatgctgatatgttcagcccggtcacgaatccggcattttctcaggagcagggacaggctatcgcccgcgcgatcaattttgactgcacgccgggtaaagtcacccgtctgcagtatgaataaaaaaataacagcctgaatgacaggctgttattgatcactgcgggttgtttttattggcgacaatctgatacccgcagcttgtcgccaggataaaaattaacaaatggtgtaacggatatgaatgatgatgtcggtcaggctgagtagcagtggtttctgcttctcaccggttgcgtccgggaagctcagggtcaggctgttatcatcatccaccgggataccttcaaacggcagccagcggccgtcattgaaatcaagccggaacaggccgtcatcattgataccgtgggatagcgcaatggctttgcagccggccggcaacgagttaccgccatagcggaatatggcccgcatatcctgatagggctctacgagtgccggtaatgtcacactgatctgtttgatacggcgtgttgtgcccagagcctcagggtagtcatctttaatgttcagtgctttcagattgaacgcggcatgcaattggttatcggcggtcattgaaagcccggttgatgccggtatattcccgctgccattacctttcaggaggtcagcaattccttctgccagagtcacattgtcagtacggtacactgccgccagagaaacagtacgggtgacctccagtgagcgactatcccgtttcagccatgcctgttccatctctgccaggttcagcagcaaagattccccggccatcagcccggcgttattgctctgccatgcgcctgatttgatgtagcgggtagccgtatcattggtctgccatgcgtaagctttttccgccatcatgcagcgtgccgctgtcaggtcatagaagcggtaatagatggatgccagacggccgcgcagccagctgtagagcgctttattactgaatttgcgctgcaggaattccagttgtgcctgagtctgcgcctgctggatttccaggtgttcgcgctgcatctctgtggcggtgcggcggacggccagggcttccagttgggcatcaatctgtttcacttcagattcggcattatttttctggatttcccattcctgacggcggcggcgccatgcttcagactggctgatattatccgcagtaattttggtggcggaggctgccaggctcatacctgcaccaattgctttcgggataccgccccagcggctgccccccacggccacgccgaagatgttcggagccatatcggcagcggcggcggccatatccagcacgccaatggaggtgctcagtattgcggaagagaggtacagatccatggtccgtttttcttccgcactgacattttcatcatacagggcgcggtagctgtcaacgcgggactgtgcaccggcacggctctgttccagtgttttcttctcggcatccagttcggtgagagcctgttcctgcatacgcagggaagagagcatcagctcaccggcctggttttgcagcagttcactcatcgcctccgcatcccggcgctcaatcagccccaggagggtggaaccgaactgcatcagctgcccggtcagtgaacgtgcactgtccagtgcctgcgggaagcgcattgccgggatgtcagcagacggtaaaggtttgctgccaccggaggctgcggctgcggcactgagcagtgcggccgggtctgccggtgcggcaaagaccggcagcgataacggctgaccatcaatggagagattattacgcaagttaaacaggcgcatttccagcatctgccagtagccgagcagtttttcgttttgctgtggccggaacaatccggtcagggtattagcagtgcggacgtcaggcagcagaccgccgctgcggatacggctgatttcgtcatgaaactgttttgcctgagttttatctgctgcattgcttagtgacggattttcccaaccattgctgaaaatgctgacaggtttatccccgagcagccccagcgcctgcatataccacattttggcttcattaagggtatcgcgttcctgcatgcggtaagctttgtcaccacgggcaatcagcagatccagcagtttcatcagggtgctgactttgtaatgcatcggatcattctgggcgaccgcatcgggatcaaccgaatccagcgggtcggcgttccaggacgtgtcttctttcagcggacgcacgcgccagtcaccggcaccgcttgcagcaggctgccagatatagcttaaccagcggttagcttcggtaaagttttgctcctgcaacagacgcgttgctaccatcatcggagtgtaataaaacaattcccagaaataaagggcattggcaccgctgaaatccatcggttcaccggattgtaataaaccggtgacgccgttttctgccaggccggcgaaggtgccgttgttaacgcttttatccaatgtccagccttcaggattattatcggtacggaacagcaggatttgttttgttgcttctttctggtatgtagcattgagatataaagtatcctgctgcgcaccagcagactgactcaccgcattttttccgggtttaatcagcggaataaataattttacttctgtattatcggtaacactgagtgagccactgtaaacaggaaatttgccggagcctgtggcatcattgctgtaataaatcgtaaatgcccggttagtgccgtgggtattcttgtcatacggtttcagtgtcagtgtgacataggtgccctgtcccggtttcggttcaggcagatactgggtttcaggggataatattgcgtcaattccgttattggcacgctcaattaactggcgggtgaacagtgtgtttaaccgggtacggtaaccatcccattccatatattgagcgccgtccggcgtggtgtacagggagatgactttttgaactggatcagttttttttataaccagtttataagtggtagtagctgcaagaacatctgtattcttgaacctgacttttatagtacaatccaggttattaatatctgcaccagcgggaatggttatagacagtttcccaaacgggaatgccagtgtttctcttgagactgtcgggtataatggtggccggagtccgacgtcactacctgttattgtttcaaatttcgtactatttagttcaatctcaatggagatatcatctgaactgattgttttgacttgtgctatcattttgcccaagctaagcgtgcccagttttttttcaccagtgctgatagtatatttatcttcctccaacgttaacctatcgtcggtaacatctccatatgtaaaatacaacattgatgtttctgcgtgctttataaagaaactcgcgagtttacggcctaccagctcaagaggagtaattagcggataaattctaccaatggaaagagaaatatgttttttcggtggctggttattataagtatatatggcacaagcgttaatcttatcggatatagaattatcggcaggctccattttttttgattccggagcataaaccgtaccggaatgagagttaagatgagtaatatatttcttgcgataaaaatcaggaatataattaaataatttatagggggtgatgttaatataagcagtagggttcaatatcagtgcagatatactgttttcagttttgacagtatagtcgccatgggagatgaccagatcaatttctttattcccctcttgtttttccagggtaaattcgaaagaggatatacgattcaggagggtgtttaccctgacggtagtttctgtatctaattgatgggtaaccgtggctaatatccctgctatattcggttcttttttacagctcatgtccggctgaatatgtagcccgaagctattgggctgtgtttccttttctatttgataccaggcaatgagcagtgaattatcttcctggctggcggcacagtacagacccgtttttttccactcggatatgtttttttcagtaatatcataactgaacggcgaagcccagctgccatcatatttgacatgtgtcagcttcagggtaaaagatgccgtatctttaccggtgttatctttctgtacttgtttttcaatccataacaaataaagacgtgaatggaaaatcaccggacgcaccatatccccataaggattcaccgcacaggtaatttctttccagtcactccaggcattggcggcaaaacggccattctgacatttactgtgatcggctttgcgccagtaatattttttcggctcagtctggctggtaccgataaaccaggtgttaccctgattaatattaaccgtatcatgataaccgctgactactttcaggtcagcgacctgctcaaaggcggtcaggtactggcggaagccgttttccagggtatctttgttgagctcactttgtgaaagctgctccagcatggtgttcatcatcccggtctgaccggtacggagggtcggatcaacgaagttttcagggtaatagactaactgagacacacccgcccaggtactgtagcgtttattacaggcatcccagtctttaaagaactgacgctcaagagcgtcactgtcagcacccggctcatcaccggcaatagtgcggttaatatagagctgaataccggcgatggcatctgccagcagggtggtggtgatttcagcgctgacttttccgtccaccagcagattacgccagatatcatcacggtctgccaccgggttgttcataaccagagagcggtactccccgctgagggcttcattgcggcgcggctcagactgattttgcagttgtttggtctgttgttcgctcagaccggcctgtaacaatccggccagtgcggagaggtctgtataagaaggtttcgcattttcagacactgtcagcagagtggtgatatctttcggggtgatatgcagggtatctgccaaatccagccgtggcggcaatgtggccagctgtgcccatgtggtcagttccggtttttgtccggccagtgtcagtgcctgagtaatcacctcttctgacagattcagtgcttgtgccagaattttaactgtcagtgtcccgctttgcagtgcatccagtaccgtaccggcctgtccaccgcagcggttaatcaggttatggaaatcactgatgttatacagttcagtaatggttccggccggtgcaccctgtgacaatgtctgaagttcggcattactgagtgtaaaggtacgaattgtcaatgcacgctgtgccagtgcctggcaccatgccgccaattttttcttttcgtcatcagacggcgcttttttgataataagcttccaggccccggtggtggtgggtatccctgcggtatgattgttatccagccagcgcagcagagcttcccctgattccgtgacgtccagttgcatagctgcagtaatcaccggtgccatggtggtatacagcgtttttgtattggttttgtcaataccaccgttacgcaggagatccagcaggacctgcatctctttggtcggcgccgccggagatattttatccagcagcagcatcagttgttcaaccgtgatattttgtgtattcagccattgggtgatccgggacagaaaagagagcattccctggcgtattttgccatctaaatcgtaaacgttcattgaactgtaaggggaaatctgcagcagagcatccagttgtgctactgtcaggttgtgcacatccgccagcagacgaacaaataacagaccacgaagtttttctgtcttgttttcgatagttttggatttgtttctacgatttgtgataacaaatagttgccacaaaccggtattatctacccggaaagcgcgtttcaggacttcacgacgcgggtcttcggcatccggttccatcggcatatcatcaccacctaaagtgtaagttacaccattcagcggcggattattaaacaggcggtcaaaatggctgatctgcccgtcatagctgactctgctgataccggcgttacacagcattaatgctgtttcagtatcaataccgtaacgtttacggtaaagcagcgtttcggtgaaacggcgtaattcgtattcgcttgaatcatttcttacgtggattaatgcatgttgtgtttcgtgcggggtcataccgctgacttttgccagacgcagtgttttgttgagtctgaggagccatatacccggttctgcattgggatggatggtgaaggtggctgaggtgtaatggttcccgtcgctggcaggttctggtttttttctggtgatgccgatttcagtctctgcttccagaagctcagcatccagtgtgacggggatactgtagtgctccccggcgagaggaacaaaaccatttttatctgccaggttatcaaacgatttaccatagcctatactaaaatgcggcgcgtcttttatggtttcctttacactaaaattaactaaaaactgattaccaccctgcggaattaaatcaatatagtctgcctgtttttcatcactctgtgttttggccagttcactgaatgtgatgtttccgtcagtgcttattaccggtattaccagtttattatcaccgttatacacatccggtgttggtaaccggcctgttatttcggcagcaacaagggcctgaatgtcatctgccggaagctcataataattggccagcgcatccagagtcatcaggtctttaatcttaaccttcgggaagtttcttttgagagacttttccagatcggagccggttaatgactctgtgtcttctgtcagtatgttatataactttggtgagataccggcgtcgtatgccgccagtatggcaaacttcgcagggttgctgagaatattatccggcaggacaaaattccgctgtgccagggcattatgtattccctcaaacggcgcgttatacggggttacaccactgcggcgggaggtcgccagggtttcataatatttgtttttgtctgtcttaccggtttgcgccatcagcgccgtttccagttgctcattagccagtgacagagcagagatttcgttatccagattgtcctgagagagcaccagttttgccaggtccggacggcgcttatccagattacggtcactgtcttttggatgcagtccccgtgcttcacggtacagctcagtcagataaccggcaggggaaaacatggaagagacggcgccgggtgcgacaaatttctctgcacgcggcggaataatattatcatagccatatggggtggcgccgtaataacgggcagtattcatttcttttttcagcagcgggttagcgcgggtcagcatccgggcggtatagagaatgttgttttgcttttctttttgcgctgcacggtgtagtaactgtgcttcttcacgcgataaccggcctgtgttttggctgcggatctctgcaagggacatcggcataaaatctgccagtgtcacggttgtttcaccgctgcgttgctgattcagtttttcaagaattcgggttatttgatccattgataatggcctcctaaatatgaaatttagttaatgacataagtgtgtaccttgtagtactccttaaattcattgtttaccggtgttatatttctaaaaaaatgaaatcattgatatatattactgaaattgagtgtcggttttggaatgaggatagtcaatcagaacgattagcatgatgtgctgattttgatggaaattaattatctatatgattattaatcataaaaaaagatattacgcgagcgggagtaatgagctgattttattgttttgcttttatcatcaattttatttatataaaaagtggtgtcggtgaaatgacaaaacgaatgcgatccgtatggattattcgccgggcccggttttttctgcggtaaaatgaacgtttctttgagttgagtgtctgtagcatgtagaatgctgccaataagtctattaaccagcaatatagagtgttggctttgagtccttacaggtgtccaaagctagttttatagggcattacaaagaagaattttatcttgaaaatcaaccacatccgaaatttttccattattgctcatatcgatcacggtaaatccacgttatcagatcgcattattcagatttgcggcggcttatccgaccgtgaaatggcagcgcaggttctggattcaatggatctggaacgcgaacgcggcattaccatcaaagcacagagcgtgacgctggattacaccgcacagaatggtgaaacgtaccagctcaactttatcgataccccgggacacgttgacttttcttatgaggtctcccgttcactggctgcctgtgaaggggcgctgctggtggttgatgcggggcagggggttgaggcgcagacgctggcaaactgctatacagcgatggaaatgaacctggaagttgtcccggttctgaacaaaattgacctgcctgctgccgacccggagcgggtggcggaagagattgaagatatcgtcgggattgaagccgccgatgcggtgcgctgctcggcgaaaaccggtgtgggcgtgaccgatgtgatcgaacgcctggtacgtgatattccgccgccggaaggtgaccctgatgcgccgttacaggcactgattattgactcctggtttgataactatttaggggttgtgtctctgatccggattaaaaacggcacactgcgcaaaggcgacaaaatcaaagtgatgagcaccggccaggtgtataacgcagatcgcctcgggatcttcacaccaaaacaggtcgataaagagatcctcagatgcggtgaagccggctgggtggtctgtgcgattaaagacattctcggggcaccggtcggcgatacgttaaccggcgcacgcgcaccggcggataaaccgctgccgggctttaaaaaagtcaaacctcaggtctatgcgggtctgttcccggtcagttctgatgactatgaagctttccgtgatgcacttggtaaactgagcctcaacgatgcttccctgttctatgagccggaaagctctaccgcactgggcttcggtttccgctgcggcttcctgggtcttctgcatatggagattatccaggagcgtctggagcgtgaatatgacctcgatctgatcaccaccgcgccgaccgttgtttatgaagtggaaaccaccagcggtgaaatcgtctatgtcgacagcccgtccaaattgccgccgctcaacaatattgaagagctgcgcgagccgattgcggaatgtcatatgctgctgccgcagcaatacctcggtaacgtgattaccctgtgtatcgaaaaacgcggtgtgcagaccaatatggtttatcacggtaatcaggttgctctgacctatgaaattccgatggcggaagtggtgctcgatttcttcgatcgcctgaaatccacctcacgcggctacgcatcactggattacaacttcaaacgtttccaggcgtctgacatggtgcgtgttgatatccttatcaacagtgagcgggtggatgcactggcactgattacgcaccgcgataattctatgtaccgcggccgtgagctggtggagaagatgaaagacctgatccctcgtcagcagtttgatatcgcgatccaggctgccatcggtatgcatattattgcgcgttcaacagtgaaacagctgcgtaaaaacgttctggcgaaatgctacggcggtgacgtcagccgtaagaagaaactgttgcagaaacagaaagacggtaagaaacgcatgaaacaggtcggtaacgttgagttaccgcaggaagcgtttttagccattctccatgtcggcaaagattaatcattcagcaggttgtaaggagacataatggcgaacacctttgcgctgatcctgaccctggcaacgttggttaccgggatcatctgggcggtgaataaatttaaaattcagccggcccgtaagaaaaaactggcgcgcatggcggagctgactgaaggaaccatggatcaggcccatctggctgagactgtggccaaaccgggctgggtggaaggtaccgcatccctgttcccggtgctggcgattgtcctgatcgtgcgctcatttatttatgagccgttccagatcccgtccgggtccatgatgccgacgctgttaatcggcgactttatgctggtggaaaaatacgcgtacgggttaaaagacccgatcacgcagaccaccctgatcaaaaccggggagccgaagcgcggtgatattgtcgtgtttaaatatccggaagatccgcgtgtcgattatgtcaaacgtgtgattggcctgccgggcgataaagttgtttatgacccgtatgccaaagagttacaggtctatccgggctgtaccaaagaccagagcagctgtgaaaccctgccggtcacctatggtcaggagtatgaaagcgagtgggctatccgctgggaaaaatccccgctgggcggctcctttatgagtggcggcgcacgtcagttccctatcgaagatgatatggaagtcggttatcgtcgtcaggcggaacggattgaaaacctggggccggttgctcaccatattctgactgttccggaaatcaccccggacagcatcagcgggcagcgcctgttccgtcagccgggattaccggagtacacctgggtggtgccggaagggcattactttatgatgggtgataaccgcgataacagtgcggacagccgcgtctggggatttgtgcctgagcaaaacctggtcggccgtgcaagctttatctggttaagccttgaaaaacaggaaggtgaatggcctaccggtctgcgcctgagccgtttcggacggatagaatagaaaaaacagaatttgctgagcattacctgtaatcacagtgtagaatatgccccgcaaaatgattggctccccggtatacggggagccagtgcaaacgcaacagttttgtatcgcggcttttcgcggctacaggtctgttgcgtgtgcgttttataaacatcctaatttttggtcgcacatgaacccgatagtgataaaccagctgcagcgaaaactcggctatacttttacccgtcaggacttattaatgcaggcactcactcaccgcagtgccagcagcaaacataacgaacgcctggaatttctcggcgattctattttaagttttgttattgccaatgatttatatcaccgcttcccgaaagtggatgaaggggatatgagccggatgcgcgccacactggtgcgcggaaataccctggcggaactggcccgcgaatttaacctcggcgaatgtctgcgcctggggcccggggaactgaaaagcggcggcagccgccgtgaatcgatcctcgcggataccgtcgaagccctgattggcgggatttttctcgacagtgatattcagacaattgagcggattatcctcagctggtatgaatccagactgaacgaaatctcgcccggggataaacaaaaagacccgaaaacccggttacaggaataccttcaggggcggcatctgcctctgccgaactacctggttgttcaggtaaaaggtgaagctcacgatcaggagttcaccattcactgccaaatcagcggtgttgaacagccggtaaaaggaaccggttccagccgccggaaagccgaacaggccgcggcggaacaagcattaattttgttggagcttgaatgagcgaagaaaacacctattgcggctttgtcgcgatagtcggacgtcccaatgtgggcaaatccaccttactgaaccagttactggggcagaaagtctctattacctcgcggaaaccgcagaccacgcggcaccgcattatggggatcgatacacaggataattaccagattatctatgtggataccccggggctgcatattgaggagaaacgggcaatcaaccgcctgatgaaccgtgcggccagcagctccatcggtgatgttgagctggtgattttcatggttgaaggcaccaactggacgccggatgatgagatggtactgaataaagtccgctctctgcgctgccctgtactgcttgccatcaacaaagtggacaacgtggaagataaaaccaaactgctgccgcatattgcgttcctaagccagcagatggatttcctcgacgtggtgccgctcagtgccgagaagaaaatgaacgtcgataccattgcgaacatcgtgcgtcagcacattccgcaggcaccgttccacttcccggaagattacatcactgaccgttcacagcgttttatggcctctgaaatcatccgtgaaaaactgatgcgtttcctcggcgatgaactgccgtactcggtgactgtggaaatcgaacagtttgttgtgcaggacaacggcgtatttcagatcaacggtctgatcctcgttgaacgcgaaggccagaaaaaaatggttatcggcaacaaaggcagccgtatcaaaactatcgggacggaatcccgtattgatatggaacgcctgtttgatgcccgtgttcacctcgaactgtgggtgaaagtcaaagccggctgggcagatgatgaacgtgcactgcgcagcctgggttatgttgacgacctgaagtaacgcaccaatggacggctggcagcgcgcatttgtactccatagtcgcccttacagtgaaaccagtctgatgctggatgtattcactgaacaggaagggcggcagcgcctgctggcgaaaggggcgcgccgccgccgttcaggtctcaaaggggcattacagccctttacgccgcttctgatccgctggggcgggcgcggggaactgaaaaccctgcgtgatgcggatcctatttccctcgcattacctctgagtggtactgtcctttacagcggtctgtatatcaatgagctgctctcccgtgtgctggctaacggcgtcacctattccgctctgttttttgactatctgcgctgccttcagtatctcgcggccagcgacaccacaccggaacaggcactgcgtcagtttgagctggcactgctgcatcatatcggttacggcgtggactttcttcactgtgcaggcagcggacaggaagtctctgataccatgacgtaccgttaccgtgaggaaaaaggctttatcgccagcctggtggtggataacagcagtttcaccggccgtgaactgaaagcacttgccgcccgggaattcccggatgcggaaactttacgtgccgccaaacgcttcacccgcatcgctttaaaaccctatctcggcggaaagccattgaaaagccgcgaattatttcgtcaatttgtgcgcccgccgttggtttcaaaagaaaatggccgcagtggttcctcttcgtctgaaaaaggttaaactgaataacaaaagttacccggaggatgataaaaaatgagtgaagttttattgggtgtaaacattgaccacattgcaactgtccgtaatgcacgcggcaccaactatcctgacccggttcaggcggcatttgtcgcagagcaggcgggggcggaaggtatcactgtgcatctgcgcgaagaccgccgtcatatcaccgaccgtgatgtggaactgctgagacaaaccattcagacccgtatgaacctggaaatggcggtcactgatgaaatggtcgatatcgcctgccgtatcagaccggcattctgctgcctggtaccggaaaagcgtcaggaagttactacggaaggcggtctggatgttgccggtcagaaagaaaaaatcgcccgtgcggtgaaacgcctgactgaagcgggtattaaagtttccctgtttatcgaccctgaccatacccagattgatgctgcggatgatgtcggcgcaccgtttattgagatccacaccggcgcttatgcggacgcggaaacgtctcaggaagaagacaaagaatttatccgtatcaaagatgcggttgcttatgcggctggtaagggcctgaaagtgaatgccggacacggtctgaactatcacaacgtccagcgtgttgcggcactgccggcgatttatgagctgaatatcggccatgcgatcatcggccgtgcggtcttcagcggactggctgctgctgttgcggatatgaaaaccctgctgcgggaagcccgtcgttaatggcaattgtcggcattggtacagatattgttgaaataagtcgtattgaagcggttatcgggcgttccggcgaccgctttgcaaaacggatcctcagtgacgcggaatgggacgtgtaccggcagcataaacagccggtgcgctttctggccaagcggtttgcggttaaagaagcggcatccaaagcactgggcaccgggatccgtcaggggctggcgtttaaccagtttgaagtcagtaatgactcactaggcaaacctaacctgacctttctcggctatgccggagaactggctgccgcccgtgaagtcacacactaccatgtctctattgccgacgagcgtcattacgcttgtgctacggttattctcgaaacaaacacctgaaattgcgccctctgcgggcgcatcattacgcttaaatcttatcggcgtgatacatcagcacaaacttatcccacagcatttcctgtgtttcggtatgttcaggatcgataataatggtgttggtaatcggacagactgactggcaggtcggtttatcataatgcccgacacactcagtacataaatcaggattaatttcatagatagaatcccccattgaaatcgcttcattagggcactcaggttcgcacatatcgcagtttatgcaacgttcggtaatcagtaacgccataatcgctatcaccatataaattatttaaaattcagtaacttatatcttgcacttatacgttactctctgccgcttccggcagtgttcccggaactgattatagcggcttttatcggttggtaacacccggtaaggctgttacagatgacagtatgcccaaaaatttccggaacggagataaaatgcctcaaaaactgaacggtgcacagaattcaatataatgtaccggtataccgagtcaggacatgactttcatcatagatgtacattttcagggaacagagacatggatgagccggtgaagaaaaaatataatatagcgttcatggcattgctgctgattatgctatctgttttttatatatggctatcggtagtgtacttttcagactatataaataaaaaagatattatcaaggttcatattggtcagttttttatactttctgtaccattgttactgtactttgcatcaggcagtatcatgatttttttaaataaagaaaaatttcttaaaaagcataaatttttcaaagtgttattttatatattcctttctttggctattttttcatttattttattaataatcggtccgatgtacatggataaaaaacttatatctgagggatatatcgaatgcccgaaagcctcattcaggtcatcaacggtttatgttgctgatactggtttgtgcaaaaaataacagggagtgtattccctgttattttttcagatcacagattatcatcaatcaatatttgtggtgtcagtcgcacagactctcaggcgatgaccatcggggtcggttgccacgaaagtatagccgaaatccagcattacgggtttcataataatctccactcccagttcactccatttgcggaaaatctcatcaacttcccggttactgatatctgacatgcatatttccgtaccgccaatatgtggttgtggtgcagggtcgataccggattttgcctgaagtcctaatatcatatcgtccgataaggcaaaaacagaaaattcactgtattgttcaacaggctctgcattaagaagtctggtgtaaaaacgggtacttttctcaacgtcgctgacgtacagaataatgctgtttggtttaaacatgctgcctcctgtggtttttcatatcatagccccgttgaatgacagaaattgtcagcagtgataaatccggaatagtgccaccggggttacctgtgtatttttataaaaaaataataatgatctgatgtgattggtaaatcattattttgatgttatttgtttttccggaataaagggccgaagtattgctgtggctttattatttattgccggaagtgtaacatttgcagaataaaatatattgtaacagtgaaaaaattatcttgcacagttgtggcaggaattgctgacacaatttatatcggtatgaatcaacagaacagggacttcctgtatattcttcactcaaagcaacaggtatgcaatgaaaaatatcaacacattgaagtcaatcacaaatcagggaaccggtaaatttgtattgctcagcatattaactgcgggtatttatccgataatgtgggcctgaaaaaatactgatgcctttaattcagagctgaaaatgaaaccatttgaaagttcagtgttcatttatctggcgattgcaatgggggtgtctttatggatgtattcagctttatgagtgatgcctataattacgggtatatcgctgaatcaaacaatatttatgatatattgggtactatcattacaatcgggatgactgttttctggattgtctgggcatttaagatgaagagcgctttagaatattatgcagcaaaagaattcggcatttctctgcgtcttaacggattctggacatttttatttcaatacttctatatcaactactgcatgaatgcgctggaagaagattttgccaaggaaaaaatgctggcagatgtccggagtaactactcaaataacagtacggatgatgatgaaaataaaaattaatttactgttacctctgtgcctgcttctttcagcgccggcgctggcggttgacgaataaatacgctgttaattcctgtctctgaaaacgggctgttaatctgtgatagcggcccgtttatttcagctacttccctcagatgcacatgtttaaatcagtgatttatacccgttcagtaaataaggcgccaaatgccagaccgtatcattatcggtaaattgcacattcattttcagcatcatattttctgacaggcagaacgggaagaaatgatataagtgcatgacaaacataaaggcatcgccggtattgtcatatttatgcggatccagtgtcattgtcagatccagacagcggtaaggttttccccggacaaggcggtcatccagtactgaatcaaccgcgtgaataccgctcagcaattggtttatctgtttgcagcgctgccggtctgtatcctgatacagcacatagtcactgatcagctgttttaccgaatctactgacgacagcataaaactgttggcactgtagtgtgacagcagattccagtaagcgtgattatccgttatcggcgggtagcacggcgtgcattgtgtgataccggtggcttccagcaggtccggcagcagcgggcggaatatgattatgacatctccgggcacagaaccggcggccactcctggccacattcattaaaaattattttaaaaaccataactattttgataaataacaagtctgctttgtggtcaccatgttacggtcggataaatattggccaggcgggagcgggatatgccttatttattcttaacgctggcggcgtgtttctggggcgggaactatgttgtcgggcatcttttggtgacagaagccgacccggtgattttatcgcaactgcgctggctggtgacggcggttttactgatgacgctgtatttcagtcaggtgaaacagcagtgggaattcatgaaaaaggcaaaagggataattctgtttctgtcattatgcggacaggttttattcccggtcacattgtatattggtctgcaatataccacagcacttaatgctgctatttatatgtcggcaacgccgtcaattgttttactgatcaatgcgctggtgtttaaagaaaaaattcaggggaaaaattatatcggcgtattattgagtacgttaggtgtgatttatctgatatttaaaggtaatctgaatttttcagaagtgatcagtcatctgaataaaggagatttgtgggcactggggtccgccatcagctgggcgttgtattgtgcttttttaagactgaaaccccgtgaggtgaaaggtaatgcatttgtggccatcagctcggtgaccggcagcctgatgatgttaccaatactgattatttatctgttttcacatgattttcagatcagcaatatgggaaattatgcctcgccgctgtttatatccgggcttgcctatctggttatttttccgtcttggctatcatacctgctgtggaataaaggtatcctgactatcggtacaacaagaggggagattttctctcacctgatcccgctgagtggcggtttctttggtgttcttttcctcagtgaaaaattacacagtttccattttttaagtggtgctttaattatttccggaatttatttttgttcttctgcgaaaaaacaggggtaaagtaaagggggatgatgcttgttattttttatttatttccattggtaaataataatggagtgtcattaatcccgattattttaaaaattaatatcacaggcggccgggtgccgggacataaaaatccatctcctatgataaagaaactggccacatcggtactggtacaatcaaatactaaaaaacaaaccggagcgatattgaaactctggcctctgatgtactgaaaagtgatcagtatgatgaaaaagccaaagcttttgcggcattggaactgtctcaggctaataaagaacgattcagtccgtgtaagtaatgtgttatttaataacagtcagtaattaaaattgaagtgtaagataaataatgaaattattttttattgaagaggggtgataggtaatatctgattatattgtcgctgtgaataataaataagaccacggattagttagcatgaataccggtatatacggattattctctgtttttcatgatgtaaaaaaggaattcttgattaagatttaaataatatggagtatatatgcacataccatgacgttatctgtaaaccggtgtgtcgctatatgacttttttattgataaggatatccgtatgaaagaattatctgttcgtgagtgtgacgctgtcatcggcagcggaatcgctgattttctccggccgggaagcggtgatgtttctccgtcggtaacaccggaaaaaaccggtggtcagttgattatcggcgggggaatcggtctgggcttcgggggattcccgtttatcgtcggtgttttcattggcgggatcattaaaattccccgctgatacaaagataataaataaggtcactgcggtgaccttttttgtgcccggaagaaagtgaaaagaataaaaaaaagcccggacacaaaacgtgaccgggcggaaaggatataggtatgataatcatgaacagtatggaaagttcatgtgtgtataataaagggagctgtctaaacaaaagcacaacacaaggccgttacagggaaaccggtggcaggtgttgttttttacggtgtcacaccataaccgcttccgggagactgctgtgtattttgttcttacggcacggtggcttgtccgccggtacaggaagccgcgctgacggggaaaaaatcctgctgctgtcagtcgtccggggaataaaaaatacccgcacaggttagtgtgcgggtaaatcatgtcagaacgtgtacctgcacagtcaggagcaggtcagtaatgtgaatatcaattaattaaaactgcttatcaatatagtcgctgtacggaagatgtacagcataaaaatgtatttacggttatttttagtatttacacgtagttgtttatatcaggtgggatacttatattgcagtatattttttccatgatatacaatgcattaccgggttattgaccaacatttctgacgggaaataaaaaagcctctgaacaaacgaaaccggttcagaggcgtcaggcgttactttcagcttggtaacatcttgaagatagttaaattatatgaattagtcaaaaaatgactgatcaaaaaaatgtgcttttgccgggaaggaaagggagaacagagtattgcacagcatcataaataaaaacgcctttcagttttgatataacactgaaaggcgttcagagagacaatacgtctgcgttcatttaatcatcccatttcgggctcatgacggtggcaaacagacaggataagataataaatccgagtgtcagtaaaaacatatattctccttaatataactttagtctgatccgataaacattctccggcggaaggtaataaatcataatgtgtcttcactgactgattctacctgataaagccggtaactcaatgaaagaaaactgatttattgtcatgatttgtcatctttgtccggggtgtgctgacaaagaataaagtatgtaaataaaaacagcagaaatgaaaatatccgtcgcagcaaaaaaaagagtggcaataagatataaaggttgtacattgtcagcatgatgaataataaaattccaggctgtttatcacacaatgctttctggtggcgcacaacatgcggcgccggttttgttattcagttttaattgcaaaaatcgccgccggagtgcggcgatttcatttcagacatattgcattcaccccggcggcctctgatcacaataaaagaggaaatcgtatgtctgttcatcacacccaatccgttattctgaccggcgaccgtatcaccgggccgttacacctcggacactataccggctcgctgcaacagcgggtcagacttcagcattctgccgtgcagtatattctgatggcggatatgcagggactgacggataacggtgcgcaacccgaaaaagtaaaccgttatttttatgatgtagcggcggattacctggcggcaggcatcgatcccgcccattcggtgatttgtctgcaatcggcgctgcccgcactggctgaactgacactgctgtatctcaatctggtgaccgtttcccggctggagcggaatccgacggttaaacaggaaatcattcagaagcagttctcccgtacactgccggccggatttctgatttatccggtcagccaggcggcggatatcactgcgtttaaagctgatctggtgccggtcggggaagatcaactgccgatgattgaacaaaccaatgagattgtcagcaaaatcaatcatgttaccgggcaggaattactggttcactgccgtgctgaagtcggtaaaaccggccgcctgccggggattgacggtaacggtaagatgtccaaatcactgggaaatgccattaatctctctgtcagtgcggatgacctgacgcgtgccgtcaatgctatgtttaccgatccgcagcatctgcgggtgtctgatcccggccggattgagggcaatgtggtgtttgcgtatcttgatgcgtttcatccggatacagccctggttgctgagatgaaagcccgttatcaggcgggcggtttaggcgacagggagtgcaaatcagtgctgaacgagtgcctgcaggcactgctggcaccgatccgtgaggagcgggcgcgactgatggcggataagtcttatctgctctcggttatccgccgcgggacagaaaaagcgcgggaagtgacacagcagacgctggatcaggtaaaaagaggaatggggctgcttattttttgaaccgcattttttgcggattatgctgaataagcaggatgcgattgattcccgtttgcgggaggtctactatatgaaccatatctgttttatatatggtttatcagttaaggatttcacgtgggtattgttaaaatctccgatgaattacatgaatatctgcgccgggcgagcacagtgatgtcgcgctctatcaatgctcaggcagaattctggatcaaaatcggaatgcaggctgaaatgaatccggataaaaccttcacaatgcttgtcagcgaaatgctggaaaaagagtctgtcagccggaaaggagaacagcatgagtagtatcgttataaaaacacctgaagaaattgagctgatgcgggaatcaggtcgtctgctggcaagcgtttttgccatgctggacgatttcattaaaccgggtgtttccacgctggcgattaatgacaaagttgaagattatattgtgaatacccttcagtcacgccctgccagtaaaggacagtacgggtttcagtatgtgctgaatacctcgctgaatgaagtggtgtgccacggcgttccgaaagcggacgaactggtgaaagataaagatatcattaacgtggatatcacactggaaaagaacggctttattgccgattccagtaaaatgtatgtgatgccggaagcatcgccgctggcccgtaaactggtgaaaaccacctatgatgccatgtgggaaggtattcagcaggtgaaaccgggcgcgacgctgggggatatcggttcagctattcagcattatgctgaatcacgcggctacagcgtggtgcgcgagtattgcggtcacggtatcggccgtgagatgcatgaagccccgcaggtgctgcactatggtgtgcgcggtaaaggaacggaactgaaagaggggatgacctttaccatcgaaccgatgattaaccagggtggcgcgaaaatcaaaaccaaaaaagatggctggacggtggtgacacgggataaaaaattatccgcgcagtccgaacacaccattctggtgaccgcgaccggctatgaagtgttaactctgcgtgcggatgaaacattacgctgatttttatctgtataaacaacagagtgtgcaaagcccggctgcgaccgggctttttttatcagagcagatcaggccttcagaaagcgcagaaactgttcatacagcacgccgcccagcgtctgtgcggtgtagtgtccggactgcggcagggtatccaccgccgcatgcataccgtgataaataatcatggccgtgatatccggatgtgccacccgccagtgactgtgcttctcaccttccgcaatcagggcaagcagctgattcagcacggcattttcatggtcattgccctgctggtgaaatccctgatggaacaggacatcatgcagttcctgtttttcagtataggccgtgacagaacgatcacaccaggctgccagtctggcatccgcatcacctgccgcacaggcatccatcgcctgctgagtctgtgacagaaaccagtccatataacggtggcgtaatgcctcgtaaatgtccggtttggcggcaaaatagtggtaataggttcccttggcgacaccggcccgcgccacaatgtcactgactgtagtggcatcaaatcccttttcgagaaacagtgattcggcggcatccatcagttcattgatccggacatcggcaggtttaaaacggggtttgtgttctgctgactgagtcataaacgtgccttgtataacggaaaaccctcattatgccatttccggggtatgaaggcgaaaaaaatgcgcaaatgaaatacgttctcatttttattgaccgttggtcggtcaatgtgtattctgcctctgtgaaaggagaacactatgaacagacttcgttattttgccgttactaccgcgatttgcctgggtacttttatggcaacgctggatatcagtatcgtgaatgtggcactgccggccattcagcatgatttggatgcaccgatggtgtcattacagtggctgatagatgcttatgcattgtgcttatccgccgttatcctgtccgccggtccgctgagtgaccgttacgggcgcaaaaagatgtggctggcgggtgtgctgatttttaccctcggctcactgctttgtgcactggcggatacactgccgttgctgctgtcagggcgggtagtgcaggggatagcggcggcgctgctgatccccggagctttgtcgctgatcacgcatacttttgcggataatcagcagcggatccgtgtgattggtatctggtcatcggtcagtgcgctgtcactgattaccgggccgatcctcggcggcgtgctggtgcataccaccggctgggaaggcatttttctgatcaatattccggttggtataatcacgtttctgctcgggcagtacggcatccgtgaaagtgcggatccggagaaagcggcgtttgatccggcagggcagttactcagtatcgcagcgctgggctgtgtgacatacgggctgacagaggcgggtattcatggctggctgcatccgctgacgctgttaactgtcaccggcggaattatttttcttttattatttctgtacaccgaaagccgggtggcaaaaccgctgctgccgctggcggatttcggacgccgcgagtatctgcactataatctggcctcgtttgtgattggttttgcggcttacaccaatgtgttttttatcgcgctgtttttacagaaagcgcagggctggaatgcccttgaagcaggatggcggatgtcgccggaatttatcgccatggcgctgtttgcattctctttcgggcggatcgcccgcaaactgagtatccggctgatcctcggcaccggtctgctgctgaccgcagcggcctgcgggctgatgactttactgacgccgtatacgccgtatccgctgacagggctgatgctgtttatgctcggcaccggtatgggattatcgattcccgccaccggggcgctgattatgcatgccgctgatccggcgcgttccggcgtggcatcggcgacactgaatatgatgcgccagaccggtatgacgctgggggtggcactgctcggtacactgatgatacagcgggcggtcagtattgcgcagcaccgtcagctgccgtctgcagagcagcttattaccggcgcacagagcggagaactgacagttgccgtgcagaatacagtttatgaagcctttgcgggcgggtttaatctggcaatggcaggcgcagcattatcggcagtatgggtatttatcctgatattttatccccgcggccgcaaaatgccgcaggaaaacgggaaaataaccttataacagagtgggtatatccgtggcatgtattttgtgatttattaatctgaacacaaaataataaaaatcagcagtaaatttgcacacaccacggaggcgttatgtttgaaaatctgggcatactgaatatcggtacttatattatcggcgttatttttattatccttgtgccggggccgaactcactgtatgtccttaaatccagtgcgacattcggatataaaaaaggttaccaggccgcactgggcgtatttaccggtgatgcggtactgatcatgttgtcatttctgggcgtggcctcagtgattaaagcctctccggcattatttaccgccgtgcgttacctcggtgccgcgtatttattgtatctgggactgaaaatcctctatgccacctttatgcagaagaaggggcatcatgaggataagccgctgaaagcggaaaatgcctttaataaagccctgatcctgagcctgacaaacccgaaagcaattctgttttatgtctctttctttatccagtttattgattttaattattctcatccggcggtgagttatggcgtgctggcgctgattctggaaacggtcagttttttgtatctctcctttttaatttacagcggcactaaattatcacagttcttccgccacaaaaaacaggcggcaaaagtgggcaacagcaccatcggactgttttttatgggctttgccgccaaactggcgctgtttacggcgtaaagaaactgcctgcctgacaaaagtgacgctatactgtgcctgattttaaataagcaggtatccacgtgactgacagtacaacaccttataataatgatgaattctggatgaggcaggcgctggcgctggcagaagaggcggcgctggccggagagatcccggtcggggctgtgctggtgaaagataatcagcgcattgccggtggtttcaatcagccgatcctcagccatgacccgacagcccacgctgaaattgttacgttgcgcggggccggggcggtgctggaaaattaccgtcttaccgatgccacactgtatgtcaccctcgaaccctgcatgatgtgtgccggggcactgatccacagccggatcaaacgtctggtgtacggcgcggcagagccgaaaaccggtgctgcggggtcatttattgatttgctgaccttaccgcgtctcaatcattatatggaagtgacagggggcgtgctgggggaggagtgttcggcaatgctcagtgaatttttccgccaccgccgtgcggagaaaaaagccctgaaaaaacagcatgcggaaagtcagaaatcagagaatgagtgatcagtttggtgcggcagaggtcagaatctctgccgtttcttcctgcggctgctgtaacagcagctcttcctgatgtaaatcgagatagccctgtaaactgagctggtaacgacgcaccccttccacatagcggtaagcttcgtaaccgcgcgcatagccgtacggcagagactgataataggcttttttgctcagcagcggcagacgggatttcacatccagccaactgtccggatccgccccctgcatctcggtcagtttgcggacatccagcatatgaccgtagcccatattataagcggcgagggcaaaccagattttttcatcatcggggatggaatccggcagtttgtccatcaggtaatttatatatgtcccgccgcccttgatgctctgctcagggtcaaggcgatcctcaatcccgaagaaatccgccgtcggccgggtcagcatcataatgccgcgcacgccggtcggtgaggtggcggtcgggttcc

(The sequence listing continues in the following parts.)

1. A diagnostic method of determining an infection of a patient with Morganella species potentially resistant to antimicrobial drug, e.g. antibiotic, treatment, comprising the steps of:
a) obtaining or providing a sample containing or suspected of containing at least one Morganella species from the patient;
b) determining the presence of at least one mutation in at least two genes from the group of genes consisting of MU9_880, MU9_413, MU9_1843, MU9_425, MU9_14, MU9_3039, MU9_3029, MU9_626, MU9_3041, MU9_489, MU9_2759, MU9_2077, MU9_502, MU9_2754, MU9_2763, MU9_2127, MU9_1555, MU9_2124, MU9_3032, MU9_3373, MU9_1716, MU9_910, MU9_1547, MU9_3338, MU9_1556, MU9_2545, MU9_2764, MU9_146, MU9_2018, MU9_3034, MU9_1112, MU9_875, MU9_2404, MU9_718, MU9_2587, MU9_1311, MU9_1153, MU9_3478, MU9_346, MU9_3401, MU9_2177, MU9_1142, MU9_1507, MU9_2791, MU9_1456, MU9_720, MU9_63, MU9_3309, MU9_3395, MU9_911, and MU9_2615, wherein the presence of said at least two mutations is indicative of an infection with an antimicrobial drug, e.g. antibiotic, resistant Morganella strain in said patient.

2. A method of selecting a treatment of a patient suffering from an infection with a potentially resistant Morganella strain, comprising the steps of:
a) obtaining or providing a sample containing or suspected of containing at least one Morganella species from the patient;
b) determining the presence of at least one mutation in at least two genes from the group of genes consisting of MU9_880, MU9_413, MU9_1843, MU9_425, MU9_14, MU9_3039, MU9_3029, MU9_626, MU9_3041, MU9_489, MU9_2759, MU9_2077, MU9_502, MU9_2754, MU9_2763, MU9_2127, MU9_1555, MU9_2124, MU9_3032, MU9_3373, MU9_1716, MU9_910, MU9_1547, MU9_3338, MU9_1556, MU9_2545, MU9_2764, MU9_146, MU9_2018, MU9_3034, MU9_1112, MU9_875, MU9_2404, MU9_718, MU9_2587, MU9_1311, MU9_1153, MU9_3478, MU9_346, MU9_3401, MU9_2177, MU9_1142, MU9_1507, MU9_2791, MU9_1456, MU9_720, MU9_63, MU9_3309, MU9_3395, MU9_911, and MU9_2615, wherein the presence of said at least two mutations is indicative of a resistance to one or more antimicrobial, e.g. antibiotic, drugs;
c) identifying said at least one or more antimicrobial, e.g. antibiotic, drugs; and
d) selecting one or more antimicrobial, e.g. antibiotic, drugs different from the ones identified in step c) and being suitable for the treatment of a Morganella infection.

3. The method of one or more of the preceding claims, wherein at least a mutation in MU9_880 and/or MU9_413, particularly in position 987896 and/or 453465, respectively, with regard to reference genome NC 020418 as annotated at the NCBI, is determined.

4. The method of one or more of the preceding claims, wherein the method involves determining the resistance of Morganella to one or more antimicrobial, e.g. antibiotic, drugs.

5. The method of any one of claims 1 to 4, wherein the antimicrobial, e.g. antibiotic, drug is selected from quinolone antibiotics, preferably fluoroquinolone antibiotics, and the presence of a mutation in the following genes is determined: MU9_880, MU9_1843, and/or MU9_489; and/or wherein the antimicrobial, e.g. antibiotic, drug is selected from aminoglycoside antibiotics and the presence of a mutation in the following genes is determined:
MU9_880, and/or MU9_1843; and/or
wherein the antimicrobial, e.g. antibiotic, drug is selected from polyketide antibiotics, preferably tetracycline antibiotics, and the presence of a mutation in the following genes is determined: MU9_413, MU9_425, MU9_14, MU9_3039, MU9_3029, MU9_626, MU9_3041, MU9_2759, MU9_2077, MU9_502, MU9_2754, MU9_2763, MU9_2127, MU9_1555, MU9_2124, MU9_3032, MU9_3373, MU9_1716, MU9_910, MU9_1547, MU9_3338, MU9_1556, MU9_2545, MU9_2764, MU9_146, MU9_2018, MU9_3034, MU9_1112, MU9_875, MU9_2404, MU9_718, MU9_2587, MU9_1311, MU9_1153, MU9_3478, MU9_346, MU9_3401, MU9_2177, MU9_1142, MU9_1507, MU9_2791, MU9_1456, MU9_720, MU9_63, MU9_3309, MU9_3395, MU9_911, and/or MU9_2615; and/or wherein the antimicrobial, e.g. antibiotic, drug is selected from benzene derived/sulfonamide antibiotics and the presence of a mutation in the following genes is determined: MU9_880, MU9_413, MU9_1843, MU9_425, and/or MU9_3041.

6. The method of one or more of the preceding claims, wherein the antimicrobial drug, e.g. antibiotic drug, is selected from the group consisting of Amoxicillin/K Clavulanate (AUG), Ampicillin (AM), Aztreonam (AZT), Cefazolin (CFZ), Cefepime (CPE), Cefotaxime (CFT), Ceftazidime (CAZ), Ceftriaxone (CAX), Cefuroxime (CRM), Cephalotin (CF), Ciprofloxacin (CP), Ertapenem (ETP), Gentamicin (GM), Imipenem (IMP), Levofloxacin (LVX), Meropenem (MER), Piperacillin/Tazobactam (P/T), Ampicillin/Sulbactam (A/S), Tetracycline (TE), Tobramycin (TO), and Trimethoprim/Sulfamethoxazole (T/S).

7. The method of any one of claims 1 to 6, wherein the antibiotic drug is at least one of CP and LVX and a mutation in at least one of the following nucleotide positions is detected with regard to reference genome NC_020418: 987896, 2075706, 546224; and/or
wherein the antibiotic drug is at least one of GM and TO and a mutation in at least one of the following nucleotide positions is detected with regard to reference genome NC_020418: 987896, 2075706; and/or wherein the antibiotic drug is TE and a mutation in at least one of the following nucleotide positions is detected with regard to reference genome NC_020418: 453465, 462605, 462603, 14282, 462604, 3243210, 3228648, 693707, 3244535, 2993949, 693706, 2303002, 561645, 2990262, 2997851, 3244536, 3244537, 2358613, 693542, 693635, 1772464, 693695, 2356458, 3230829, 3626894, 1948383, 693570, 1028566, 1760161, 3593257, 1773458, 2792025, 3228649, 2999901, 164042, 2251541, 3232794, 2791971, 1258668, 982378, 2634116, 795874, 2838191, 1501599, 1304861, 3736963, 378588, 3659206, 2412485, 1293791, 1705869, 1774528, 3025152, 1654789, 3232981, 800038, 69035, 3562548, 1501122, 3654810, 1030766, 2862593; and/or
wherein the antibiotic drug is T/S and a mutation in at least one of the following nucleotide positions is detected with regard to reference genome NC_020418: 987896, 453465, 2075706, 462605, 462603, 462604, 3244537.

8. The method of any one of claims 1 to 7, wherein the resistance of a bacterial microorganism belonging to the species Morganella against 1, 2, 3, 4, 5, 6, 7, 8, 9, 10, 11, 12, 13, 14, 15 or 16, 17, 18, 19, 20 or 21 antibiotic drugs is determined.

9. The method of one or more of the preceding claims, wherein determining the nucleic acid sequence information or the presence of a mutation comprises determining a partial sequence or an entire sequence of the at least two genes.

10. The method of one or more of the preceding claims, wherein determining the nucleic acid sequence information or the presence of a mutation comprises determining a partial or entire sequence of the genome of the Morganella species, wherein said partial or entire sequence of the genome comprises at least a partial sequence of said at least two genes.

11. The method of one or more of the preceding claims, wherein determining the nucleic acid sequence information or the presence of a mutation comprises using a next generation sequencing or high throughput sequencing method, preferably wherein a partial or entire genome sequence of the bacterial organism of Morganella species is determined by using a next generation sequencing or high throughput sequencing method.

12. A method of determining an antimicrobial drug, e.g. antibiotic, resistance profile for bacterial microorganisms of Morganella species, comprising:
obtaining or providing a first data set of gene sequences of a plurality of clinical isolates of Morganella species;
providing a second data set of antimicrobial drug, e.g. antibiotic, resistance of the plurality of clinical isolates of Morganella species;
aligning the gene sequences of the first data set to at least one, preferably one, reference genome of Morganella, and/or assembling the gene sequence of the first data set, at least in part;
analyzing the gene sequences of the first data set for genetic variants to obtain a third data set of genetic variants;
correlating the third data set with the second data set and statistically analyzing the correlation; and
determining the genetic sites in the genome of Morganella associated with antimicrobial drug, e.g. antibiotic, resistance.

13. A diagnostic method of determining an infection of a patient with Morganella species potentially resistant to antimicrobial drug treatment, comprising the steps of:
a) obtaining or providing a sample containing or suspected of containing a bacterial microorganism belonging to the species Morganella from the patient;
b) determining the presence of at least one mutation in at least one gene of the bacterial microorganism belonging to the species Morganella as determined by the method of claim 12, wherein the presence of said at least one mutation is indicative of an infection with an antimicrobial drug resistant Morganella strain in said patient.

14. A method of selecting a treatment of a patient suffering from an infection with a potentially resistant Morganella strain, comprising the steps of:
a) obtaining or providing a sample containing or suspected of containing a bacterial microorganism belonging to the species Morganella from the patient;
b) determining the presence of at least one mutation in at least one gene of the bacterial microorganism belonging to the species Morganella as determined by the method of claim 12, wherein the presence of said at least one mutation is indicative of a resistance to one or more antimicrobial drugs;
c) identifying said at least one or more antimicrobial drugs; and
d) selecting one or more antimicrobial drugs different from the ones identified in step c) and being suitable for the treatment of a Morganella infection.

15. A method of acquiring an antimicrobial drug, e.g. antibiotic, resistance profile for bacterial microorganisms of Morganella species, comprising:
obtaining or providing a first data set of gene sequences of a clinical isolate of Morganella species;
providing a second data set of antimicrobial drug, e.g. antibiotic, resistance of a plurality of clinical isolates of Morganella species;
aligning the gene sequences of the first data set to at least one, preferably one, reference genome of Morganella, and/or assembling the gene sequence of the first data set, at least in part;
analyzing the gene sequences of the first data set for genetic variants to obtain a third data set of genetic variants of the first data set;
correlating the third data set with the second data set and statistically analyzing the correlation; and
determining the genetic sites in the genome of Morganella of the first data set associated with antimicrobial drug, e.g. antibiotic, resistance.

16. Computer program product comprising computer executable instructions which, when executed, perform a method according to any one of claims 12 to 15.
